United States Patent Application Publication US 2026/0315389 A1, published October 15, 2026 (application 19/479,889).

The application's sequence listing, which the Patent Office published only in electronic form, follows.

SEQUENCE LISTING (217 sequences)

SEQ ID NO: 1 - protein, 1480 aa, synthetic construct
MQRSPLEKASVVSKLFFSWTRPILRKGYRQRLELSDIYQIPSVDSADNLSEKLEREWDRELASKKNPKLINALRRCFFWRFMFYGIFLYLGEVTKAVQPLLLGRIIASYDPDNKEERSIAIYLGIGLCLLFIVRTLLLHPAIFGLHHIGMQMRIAMFSLIYKKTLKLSSRVLDKISIGQLVSLLSNNLNKFDEGLALAHFVWIAPLQVALLMGLIWELLQASAFCGLGFLIVLALFQAGLGRMMMKYRDQRAGKISERLVITSEMIENIQSVKAYCWEEAMEKMIENLRQTELKLTRKAAYVRYFNSSAFFFSGFFVVFLSVLPYALIKGIILRKIFTTISFCIVLRMAVTRQFPWAVQTWYDSLGAINKIQDFLQKQEYKTLEYNLTTTEVVMENVTAFWEEGFGELFEKAKQNNNNRKTSNGDDSLFFSNFSLLGTPVLKDINFKIERGQLLAVAGSTGAGKTSLLMMIMGELEPSEGKIKHSGRISFCSQFSWIMPGTIKENIIFGVSYDEYRYRSVIKACQLEEDISKFAEKDNIVLGEGGITLSGGQRARISLARAVYKDADLYLLDSPFGYLDVLTEKEIFESCVCKLMANKTRILVTSKMEHLKKADKILILHEGSSYFYGTFSELQNLQPDFSSKLMGCDSFDQFSAERRNSILTETLHRFSLEGDAPVSWTETKKQSFKQTGEFGEKRKNSILNPINSIRKFSIVQKTPLQMNGIEEDSDEPLERRLSLVPDSEQGEAILPRISVISTGPTLQARRRQSVLNLMTHSVNQGQNIHRKTTASTRKVSLAPQANLTELDIYSRRLSQETGLEISEEINEEDLKECFFDDMESIPAVTTWNTYLRYITVHKSLIFVLIWCLVIFLAEVAASLVVLWLLGNTPLQDKGNSTHSRNNSYAVIITSTSSYYVFYIYVGVADTLLAMGFFRGLPLVHTLITVSKILHHKMLHSVLQAPMSTLNTLKAGGILNRFSKDIAILDDLLPLTIFDFIQLLLIVIGAIAVVAVLQPYIFVATVPVIVAFIMLRAYFLQTSQQLKQLESEGRSPIFTHLVTSLKGLWTLRAFGRQPYFETLFHKALNLHTANWFLYLSTLRWFQMRIEMIFVIFFIAVTFISILTTGEGEGRVGIILTLAMNIMSTLQWAVNSSIDVDSLMRSVSRVFKFIDMPTEGKPTKSTKPYKNGQLSKVMIIENSHVKKDDIWPSGGQMTVKDLTAKYTEGGNAILENISFSISPGQRVGLLGRTGSGKSTLLSAFLRLLNTEGEIQIDGVSWDSITLQQWRKAFGVIPQKVFIFSGTFRKNLDPYEQWSDQEIWKVADEVGLRSVIEQFPGKLDFVLVDGGCVLSHGHKQLMCLARSVLSKAKILLLDEPSAHLDPVTYQIIRRTLKQAFADCTVILCEHRIEAMLECQQFLVIEENKVRQYDSIQKLLNERSLFRQAISPSDRVKLFPHRNSSKCKSKPQIAALKEETEEEVQDTRL

SEQ ID NO: 2 - protein, 1480 aa, synthetic construct
MQRSPLEKASVVSKLFFSWTRPILRKGYRQRLELSDIYQIPSVDSADNLSEKLEREWDRELASKKNPKLINALRRCFFWRFMFYGIFLYLGEVTKAVQPLLLGRIIASYDPDNKEERSIAIYLGIGLCLLFIVRTLLLHPAIFGLHHIGMQMRIAMFSLIYKKTLKLSSRVLDKISIGQLVSLLSNNLNKFDEGLALAHFVWIAPLQVALLMGLIWELLQASAFCGLGFLIVLALFQAGLGRMMMKYRDQRAGKISERLVITSEMIENIQSVKAYCWEEAMEKMIENLRQTELKLTRKAAYVRYFNSSAFFFSGFFVVFLSVLPYALIKGIILRKIFTTISFCIVLRMAVTRQFPWAVQTWYDSLGAINKIQDFLQKQEYKTLEYNLTTTEVVMENVTAFWEEGFGELFEKAKQNNNNRKTSNGDDSLFFSNFSLLGTPVLKDINFKIERGQLLAVAGSTGAGKTSLLMMIMGELEPSEGKIKHSGRISFCSQFSWIMPGTIKENIIFGVSYDEYRYRSVIKACQLEEDISKFAEKDNIVLGEGGITLSGGQRARISLARAVYKDADLYLLDSPFGYLDVLTEKEIFESCVCKLMANKTRILVTSKMEHLKKADKILILHEGSSYFYGTFSELQNLQPDFSSKLMGCDSFDQFSAERRNSILTETLHRFSLEGDAPVSWTETKKQSFKQTGEFGEKRKNSILNPINSIRKFSIVQKTPLQMNGIEEDSDEPLERRLSLVPDSEQGEAILPRISVISTGPTLQARRRQSVLNLMTHSVNQGQNIHRKTTASTRKVSLAPQANLTELDIYSRRLSQETGLEISEEINEEDLKECFFDDMESIPAVTTWNTYLRYITVHKSLIFVLIWCLVIFLAEVAASLVVLWLLGNTPLQDKGNSTHSRNNSYAVIITSTSSYYVFYIYVGVADTLLAMGFFRGLPLVHTLITVSKILHHKMLHSVLQAPMSTLNTLKAGGILNRFSKDIAILDDLLPLTIFDFIQLLLIVIGAIAVVAVLQPYIFVATVPVIVAFIMLRAYFLQTSQQLKQLESEGRSPIFTHLVTSLKGLWTLRAFGRQPYFETLFHKALNLHTANWFLYLSTLRWFQMRIEMIFVIFFIAVTFISILTTGEGEGRVGIILTLAMNIMSTLQWAVNSSIDVDSLMRSVSRVFKFIDMPTEGKPTKSTKPYKNGQLSKVMIIENSHVKKDDIWPSGGQMTVKDLTAKYTEGGNAILENISFSISPGQRVGLLGRTGSGKSTLLSAFLRLLNTEGEIQIDGVSWDSITLQQWRKAFGVIPQKVFIFSGTFRKNLDPYEQWSDQEIWKVADEVGLRSVIEQFPGKLDFVLVDGGCVLSHGHKQLMCLARSVLSKAKILLLDEPSAHLDPVTYQIIRRTLKQAFADCTVILCESRIEAMLECQQFLVIEENKVRQYDSIQKLLNERSLFRQAISPSDRVKLFPHRNSSKCKSKPQIAALKEETEEEVQDTRL

SEQ ID NO: 3 - protein, 1448 aa, synthetic construct
MQRSPLEKASVVSKLFFSWTRPILRKGYRQRLELSDIYQIPSVDSADNLSEKLEREWDRELASKKNPKLINALRRCFFWRFMFYGIFLYLGEVTKAVQPLLLGRIIASYDPDNKEERSIAIYLGIGLCLLFIVRTLLLHPAIFGLHHIGMQMRIAMFSLIYKKTLKLSSRVLDKISIGQLVSLLSNNLNKFDEGLALAHFVWIAPLQVALLMGLIWELLQASAFCGLGFLIVLALFQAGLGRMMMKYRDQRAGKISERLVITSEMIENIQSVKAYCWEEAMEKMIENLRQTELKLTRKAAYVRYFNSSAFFFSGFFVVFLSVLPYALIKGIILRKIFTTISFCIVLRMAVTRQFPWAVQTWYDSLGAINKIQDFLQKQEYKTLEYNLTTTEVVMENVTAFWEELGTPVLKDINFKIERGQLLAVAGSTGAGKTSLLMMIMGELEPSEGKIKHSGRISFCPQFSWIMPGTIKENIIFGVSYDEYRYRSVIKACQLEEDISKFPEKDNTVLGEGGITLSGGQRARISLARAVYKDADLYLLDSPFGYLDVLTEKEIFESCVCKLMANKTRILVTSKMEHLKKADKILILHEGSSYFYGTFSELQNLQPDFSSKLMGCDSFDQFSAERRNSILTETLHRFSLEGDAPVSWTETKKQSFKQTGEFGEKRKNSILNPINSIRKFSIVQKTPLQMNGIEEDSDEPLERRLSLVPDSEQGEAILPRISVISTGPTLQARRRQSVLNLMTHSVNQGQNIHRKTTASTRKVSLAPQANLTELDIYSRRLSQETGLEISEEINEEDLKECFFDDMESIPAVTTWNTYLRYITVHKSLIFVLIWCLVIFLAEVAASLVVLWLLGNTPLQDKGNSTHSRNNSYAVIITSTSSYYVFYIYVGVADTLLAMGFFRGLPLVHTLITVSKILHHKMLHSVLQAPMSTLNTLKAGGILNRFSKDIAILDDLLPLTIFDFIQLLLIVIGAIAVVAVLQPYIFVATVPVIVAFIMLRAYFLQTSQQLKQLESEGRSPIFTHLVTSLKGLWTLRAFGRQPYFETLFHKALNLHTANWFLYLSTLRWFQMRIEMIFVIFFIAVTFISILTTGEGEGRVGIILTLAMNIMSTLQWAVNSSIDVDSLMRSVSRVFKFIDMPTEGKPTKSTKPYKNGQLSKVMIIENSHVKKDDIWPSGGQMTVKDLTAKYTEGGNAILENISFSISPGQRVGLLGRTGSGKSTLLSAFLRLLNTEGEIQIDGVSWDSITLQQWRKAFGVIPQKVFIFSGTFRKNLDPYEQWSDQEIWKVADEVGLRSVIEQFPGKLDFVLVDGGCVLSHGHKQLMCLARSVLSKAKILLLDEPSAHLDPVTYQIIRRTLKQAFADCTVILCESRIEAMLECQQFLVIEENKVRQYDSIQKLLNERSLFRQAISPSDRVKLFPHRNSSKCKSKPQIAALKEETEEEVQDTRL

SEQ ID NO: 4 - RNA, 4440 nt, synthetic construct
  source 1..4440: mol_type = other RNA
atgcagcggagccctctggagaaggccagcgtggtgagcaagctgttcttcagctggaccaggcccatcctgcgaaagggctacagacagaggctggagctgtccgacatctaccagattccatccgtggacagcgccgacaatctgagcgagaagctggagagggagtgggaccgcgagctggccagcaagaagaaccctaagctgatcaacgccctgcgccgctgcttcttctggaggttcatgttctacggcatcttcctgtacctgggcgaggtgaccaaggccgtccagcctctgctgctgggccgcatcatcgccagctacgatcccgacaacaaggaggaacgctccatcgccatctacctgggcatcggcctgtgtctgctgttcatcgtgcggaccctgctgctgcaccccgccatcttcggcctgcatcacatcggcatgcagatgaggatcgccatgttctccctgatctacaagaagaccctgaagctgtccagccgcgtgctggataagatcagcatcgggcagctggtgagcctgctgagcaacaacctgaacaagttcgacgaggggttggcgctggcccacttcgtgtggattgccccgctgcaggtggctctgctgatggggctgatctgggagctgctgcaggcctctgccttctgcgggctggggtttctgatcgtgctggccctgttccaagctggcctgggccgcatgatgatgaagtaccgcgatcagagggccggcaagatcagcgagcgcctggtgatcactagcgagatgatagagaacatccagagcgtgaaggcttactgttgggaggaggccatggagaagatgatcgagaacctgaggcagaccgagctgaagctgactagaaaggcagcctacgtgaggtatttcaactccagcgccttcttcttcagcggcttcttcgtggtgttcctgagcgtgctgccctacgccctgatcaagggcatcatcctgaggaagatcttcaccaccattagcttctgcatcgtgctgcgcatggccgtgaccaggcagttcccttgggccgtgcagacttggtacgacagcctgggagccatcaacaagatccaggactttctgcagaagcaggaatataagaccctggagtacaacctgaccaccaccgaggtggtgatggagaacgtgaccgccttctgggaggagggcttcggcgagctgttcgagaaggccaagcagaacaataacaaccgcaagaccagcaacggcgacgactccctcttcttcagcaactttagcctgctgggcacccctgtgctgaaggacatcaacttcaagatcgaaagaggccaactgctggccgtggccggatctaccggcgccggcaagaccagcctgctgatgatgatcatgggcgagctggagcccagcgagggcaagatcaagcacagcggccggatctccttctgctcccagttctcctggatcatgcccggcaccatcaaggagaacatcatcttcggcgtgagctacgacgagtacaggtaccggagcgtgatcaaggcctgccagctggaggaggacatctccaaatttgccgagaaggacaacattgtgctgggcgaaggcgggatcaccctgtccggtggccagcgtgcacgcatctccctggcccgggctgtgtacaaggacgccgacctgtacctgctggacagcccttttggctacctggacgtgctgaccgagaaggagatcttcgagtcctgcgtgtgtaagctgatggccaacaagaccagaatcctggtgaccagcaagatggagcatctgaagaaggccgacaagatcctgatcctgcacgaggggtccagctacttctacggcaccttcagcgagctgcagaacctgcagcccgacttcagctccaagctgatgggctgcgatagcttcgaccagttctccgccgagagaaggaactccattctgaccgagaccctgcaccgattctccctggagggagacgccccagtgagctggaccgagaccaagaagcagagcttcaagcagaccggcgagttcggagagaagcgcaagaactccatcctcaaccccatcaacagcatccggaagttcagcatcgtgcagaagacccctctgcagatgaacgggatcgaggaggacagcgacgagcccctggaacggcgactgtccctcgtgcccgacagcgagcagggcgaggccatcctgccccggatctccgtgatctccactgggcccaccctgcaagcccgacggcggcaaagcgtgctgaacctgatgacccacagcgtgaaccagggccagaatatccaccgcaagactacagccagcacccgcaaggtgagcctggctccccaggccaacctgaccgagctggacatctacagcaggaggctgagccaggagacaggcctggagatcagcgaggagatcaacgaggaggacctgaaggagtgcttcttcgacgacatggagtccatccccgccgtgaccacctggaacacctacctgagatacatcaccgtgcacaagagcctgatcttcgtgctgatctggtgcctggtgatcttcttggccgaggtagccgcctcactggtggtgctgtggctgctgggcaataccccactgcaggacaaggggaactccacccacagccggaacaacagctacgccgtgatcatcacctccaccagcagctactacgtgttctacatctacgtgggcgtggccgacacactgctggccatgggcttcttcagaggcctccctctggtgcacacactgatcaccgtgagcaagatcctgcaccacaagatgctgcacagcgtgctgcaggctcccatgtcaaccctgaacaccctgaaggccggcggcatcctgaacaggttcagcaaggacatcgccattctggacgatctgctgcccctgaccatcttcgacttcatccagctgctgctgatcgtgatcggggccatcgccgtggtggccgtgctgcagccctacatcttcgtggccacagtgcccgtgatcgtggccttcatcatgctgcgcgcctacttcctgcagacctcccagcagctgaagcagctggagagcgaaggccgcagccccatcttcacccacctggtgactagcctgaaggggctgtggaccctgcgcgccttcggcaggcagccctacttcgagaccctgttccacaaggctctgaacctgcacaccgccaactggttcctgtacctcagcaccctgcgctggttccagatgcggatcgagatgatcttcgtgatcttcttcatcgccgtgaccttcatctccatcctgaccaccggggaaggcgagggacgggtgggaatcatcctgaccctggccatgaatatcatgagcaccctgcagtgggccgtgaacagcagcatcgacgtggacagcctgatgcggtccgtgtcccgggtgttcaagttcatcgacatgcccaccgagggcaagcccaccaagagcaccaagccctacaagaacggccagctgagcaaggtgatgattatcgagaacagccacgtgaagaaggacgacatctggccttccggcggccagatgaccgtgaaggacctgaccgccaagtacaccgagggcggcaacgccatcctggagaacatcagcttctccattagccctggacagcgggtgggcctgttgggacggaccggcagtgggaagagcaccctgctgtccgccttcctgcggctgctgaacacggagggcgagatccagatcgacggggtgagctgggacagcatcaccctgcagcagtggcgaaaggccttcggcgtgatcccacagaaggtgtttattttctctggcacctttaggaagaacctggacccctacgagcagtggtccgaccaggagatctggaaggtggccgacgaggtgggcctgcggtcagtgatcgagcagttccccggcaagctggacttcgtgctggtggacggcggctgcgtgctgagccacggccacaagcagctgatgtgcctggcacgcagcgtgctgagcaaggccaagatcctgctgctggacgagccctccgcgcacctggatcccgtgacctaccagatcatcaggcggaccctgaagcaggccttcgccgactgcaccgtgatcctgtgcgagcacagaatcgaggctatgctggagtgccagcagttcctggtgatcgaggagaacaaggtgcggcagtacgactccatccagaagctgctgaacgagcgcagcctgttcagacaggctatctctcccagcgatcgcgtgaagctgttccctcacaggaacagcagcaagtgcaagtctaagccacagatcgccgccctgaaggaggagaccgaggaggaggtgcaggatacccgcctg

SEQ ID NO: 5 - RNA, 4440 nt, synthetic construct
  source 1..4440: mol_type = other RNA
atgcaaagaagtccattagagaaagcgtcggttgtgagcaagctgttcttcagctggaccaggcccatcctgcgaaagggctacagacagaggctggagctgtccgacatctaccagattccatccgtggacagcgccgacaatctgagcgagaagctggagagggagtgggaccgcgagctggccagcaagaagaaccctaagctgatcaacgccctgcgccgctgcttcttctggaggttcatgttctacggcatcttcctgtacctgggcgaggtgaccaaggccgtccagcctctgctgctgggccgcatcatcgccagctacgatcccgacaacaaggaggaacgctccatcgccatctacctgggcatcggcctgtgtctgctgttcatcgtgcggaccctgctgctgcaccccgccatcttcggcctgcatcacatcggcatgcagatgaggatcgccatgttctccctgatctacaagaagaccctgaagctgtccagccgcgtgctggataagatcagcatcgggcagctggtgagcctgctgagcaacaacctgaacaagttcgacgaggggttggcgctggcccacttcgtgtggattgccccgctgcaggtggctctgctgatggggctgatctgggagctgctgcaggcctctgccttctgcgggctggggtttctgatcgtgctggccctgttccaagctggcctgggccgcatgatgatgaagtaccgcgatcagagggccggcaagatcagcgagcgcctggtgatcactagcgagatgatagagaacatccagagcgtgaaggcttactgttgggaggaggccatggagaagatgatcgagaacctgaggcagaccgagctgaagctgactagaaaggcagcctacgtgaggtatttcaactccagcgccttcttcttcagcggcttcttcgtggtgttcctgagcgtgctgccctacgccctgatcaagggcatcatcctgaggaagatcttcaccaccattagcttctgcatcgtgctgcgcatggccgtgaccaggcagttcccttgggccgtgcagacttggtacgacagcctgggagccatcaacaagatccaggactttctgcagaagcaggaatataagaccctggagtacaacctgaccaccaccgaggtggtgatggagaacgtgaccgccttctgggaggagggcttcggcgagctgttcgagaaggccaagcagaacaataacaaccgcaagaccagcaacggcgacgactccctcttcttcagcaactttagcctgctgggcacccctgtgctgaaggacatcaacttcaagatcgaaagaggccaactgctggccgtggccggatctaccggcgccggcaagaccagcctgctgatgatgatcatgggcgagctggagcccagcgagggcaagatcaagcacagcggccggatctccttctgctcccagttctcctggatcatgcccggcaccatcaaggagaacatcatcttcggcgtgagctacgacgagtacaggtaccggagcgtgatcaaggcctgccagctggaggaggacatctccaaatttgccgagaaggacaacattgtgctgggcgaaggcgggatcaccctgtccggtggccagcgtgcacgcatctccctggcccgggctgtgtacaaggacgccgacctgtacctgctggacagcccttttggctacctggacgtgctgaccgagaaggagatcttcgagtcctgcgtgtgtaagctgatggccaacaagaccagaatcctggtgaccagcaagatggagcatctgaagaaggccgacaagatcctgatcctgcacgaggggtccagctacttctacggcaccttcagcgagctgcagaacctgcagcccgacttcagctccaagctgatgggctgcgatagcttcgaccagttctccgccgagagaaggaactccattctgaccgagaccctgcaccgattctccctggagggagacgccccagtgagctggaccgagaccaagaagcagagcttcaagcagaccggcgagttcggagagaagcgcaagaactccatcctcaaccccatcaacagcatccggaagttcagcatcgtgcagaagacccctctgcagatgaacgggatcgaggaggacagcgacgagcccctggaacggcgactgtccctcgtgcccgacagcgagcagggcgaggccatcctgccccggatctccgtgatctccactgggcccaccctgcaagcccgacggcggcaaagcgtgctgaacctgatgacccacagcgtgaaccagggccagaatatccaccgcaagactacagccagcacccgcaaggtgagcctggctccccaggccaacctgaccgagctggacatctacagcaggaggctgagccaggagacaggcctggagatcagcgaggagatcaacgaggaggacctgaaggagtgcttcttcgacgacatggagtccatccccgccgtgaccacctggaacacctacctgagatacatcaccgtgcacaagagcctgatcttcgtgctgatctggtgcctggtgatcttcttggccgaggtagccgcctcactggtggtgctgtggctgctgggcaataccccactgcaggacaaggggaactccacccacagccggaacaacagctacgccgtgatcatcacctccaccagcagctactacgtgttctacatctacgtgggcgtggccgacacactgctggccatgggcttcttcagaggcctccctctggtgcacacactgatcaccgtgagcaagatcctgcaccacaagatgctgcacagcgtgctgcaggctcccatgtcaaccctgaacaccctgaaggccggcggcatcctgaacaggttcagcaaggacatcgccattctggacgatctgctgcccctgaccatcttcgacttcatccagctgctgctgatcgtgatcggggccatcgccgtggtggccgtgctgcagccctacatcttcgtggccacagtgcccgtgatcgtggccttcatcatgctgcgcgcctacttcctgcagacctcccagcagctgaagcagctggagagcgaaggccgcagccccatcttcacccacctggtgactagcctgaaggggctgtggaccctgcgcgccttcggcaggcagccctacttcgagaccctgttccacaaggctctgaacctgcacaccgccaactggttcctgtacctcagcaccctgcgctggttccagatgcggatcgagatgatcttcgtgatcttcttcatcgccgtgaccttcatctccatcctgaccaccggggaaggcgagggacgggtgggaatcatcctgaccctggccatgaatatcatgagcaccctgcagtgggccgtgaacagcagcatcgacgtggacagcctgatgcggtccgtgtcccgggtgttcaagttcatcgacatgcccaccgagggcaagcccaccaagagcaccaagccctacaagaacggccagctgagcaaggtgatgattatcgagaacagccacgtgaagaaggacgacatctggccttccggcggccagatgaccgtgaaggacctgaccgccaagtacaccgagggcggcaacgccatcctggagaacatcagcttctccattagccctggacagcgggtgggcctgttgggacggaccggcagtgggaagagcaccctgctgtccgccttcctgcggctgctgaacacggagggcgagatccagatcgacggggtgagctgggacagcatcaccctgcagcagtggcgaaaggccttcggcgtgatcccacagaaggtgtttattttctctggcacctttaggaagaacctggacccctacgagcagtggtccgaccaggagatctggaaggtggccgacgaggtgggcctgcggtcagtgatcgagcagttccccggcaagctggacttcgtgctggtggacggcggctgcgtgctgagccacggccacaagcagctgatgtgcctggcacgcagcgtgctgagcaaggccaagatcctgctgctggacgagccctccgcgcacctggatcccgtgacctaccagatcatcaggcggaccctgaagcaggccttcgccgactgcaccgtgatcctgtgcgagcacagaatcgaggctatgctggagtgccagcagttcctggtgatcgaggagaacaaggtgcggcagtacgactccatccagaagctgctgaacgagcgcagcctgttcagacaggctatctctcccagcgatcgcgtgaagctgttccctcacaggaacagcagcaagtgcaagtctaagccacagatcgccgccctgaaggaggagaccgaggaggaggtgcaggatacccgcctg

SEQ ID NO: 6 - RNA, 4440 nt, synthetic construct
  source 1..4440: mol_type = other RNA
atgcagaggagcccgctggagaaggccagcgtggtgtccaagctgttcttctcctggacccggcccatcctgcggaagggataccggcagcggctggagctgagcgacatctaccagatccccagcgtggactccgccgacaacctgagcgagaagctggagcgggagtgggaccgggagctggcctccaagaagaaccccaagctgatcaacgccctgcgccggtgcttcttctggcggttcatgttctacggcatcttcctgtacctgggcgaggtgaccaaggccgtgcagcccctgctgttgggccgcatcatcgccagctacgaccccgacaacaaggaggagcgcagcatcgccatctacctgggcatcggcctgtgcctgctcttcatcgtgcgcaccctgctgctgcaccccgccatcttcggcctgcaccacatcgggatgcagatgcggatcgccatgttcagcctcatctacaagaagaccctgaagctgtccagcagggtgctggacaagatcagcatcgggcagctggtgagcctgctgtccaacaacctgaacaagttcgacgagggcctggccctagcccacttcgtgtggatcgcccctctgcaggtggccctgctgatgggcctgatctgggagctgctgcaggcctccgccttctgcgggctgggcttcctgatcgtgctggccctgtttcaggcagggctgggacggatgatgatgaagtatcgggaccagcgggctggaaagatctccgagcgactggtaatcaccagcgaaatgatcgagaacatccagtccgtgaaggcctactgctgggaggaggccatggagaagatgatcgagaatctgcggcagaccgagctgaagctgaccagaaaggccgcctacgtgaggtacttcaacagctccgccttcttcttcagcggcttcttcgtggtgttcctgtccgtgctgccttacgccctgatcaagggcatcatcctgaggaagatcttcaccaccatcagcttctgcatcgtgctgcggatggccgtgacccgccagttcccctgggccgtgcagacctggtacgacagcctgggcgccatcaacaagatccaggacttcctgcagaagcaggagtacaagaccctggagtacaacctgaccaccaccgaggtggtgatggagaacgtgaccgccttctgggaggagggcttcggcgagctgttcgagaaggccaagcagaacaacaacaaccggaagaccagcaacggcgacgacagcctgttcttctccaacttcagcctgctgggcaccccagtgctgaaggacatcaacttcaagatcgagcggggacagttgctggctgtggccggctccaccggcgccggaaagactagcctgctgatgatgatcatgggcgagctggagccctccgaggggaagatcaagcactcaggccggatcagcttctgcagccagttctcttggatcatgcccggcaccatcaaggagaacatcatcttcggcgtgtcctacgacgagtaccggtaccggagcgtgatcaaggcctgccagctggaggaggacatcagcaagttcgccgagaaggacaacatcgtgctgggcgagggaggcatcaccctgagcggaggccaacgggcaaggatcagcctggccagggccgtgtacaaggacgctgacctgtacctgctggacagccccttcggctacctggacgtgctgaccgagaaggagatcttcgagtcctgcgtgtgcaagctgatggccaacaagacccgcatcctggtgaccagcaagatggagcacctgaagaaggccgacaagatcctgatcctgcacgagggatccagctacttctacggcaccttcagcgagctgcagaacctgcagcccgacttcagcagcaagcttatggggtgcgacagcttcgaccagttctccgctgagcgccggaattccatcctgaccgagaccctgcaccgcttctccctggagggcgacgctcccgtgagctggaccgagaccaagaagcagtccttcaagcagaccggggagttcggcgagaagcggaagaacagcatcctgaaccccatcaacagcatccggaagttctccatcgtccagaagacacccctgcagatgaacgggatcgaggaggacagcgacgagcccttggagcggcgcctgagcctggtgcccgacagcgagcagggcgaggccatcctgccccgcatctccgtgatcagcaccggccccacactgcaggcccggagacgccagtccgtgctgaacctgatgacccactccgtgaaccaggggcagaacatccatcggaagaccaccgcctccacccggaaggtgagcctggccccacaggccaacctgaccgagctggatatctactcccggaggctgagccaggagaccggcctggagatcagcgaggagatcaacgaggaggacctgaaggagtgcttcttcgacgacatggagtccatccccgccgtgaccacctggaacacctacctgcgctacatcaccgtgcacaagtccctgatcttcgtgctcatctggtgcctggtgatcttccttgccgaagtcgccgccagcctggtggtgctgtggctgctgggcaacacccctctgcaggataagggcaacagcacccacagccggaacaacagctacgccgtgatcatcaccagcaccagctcctactacgtgttctacatctacgtgggagtggccgacaccctgctggccatgggcttcttccggggcctgcctctggtgcacaccctgatcaccgtgagcaagatcctgcaccacaagatgctgcacagcgtgctgcaggcccctatgagcaccctgaacaccctgaaggccggcgggatcctgaacaggttcagcaaggacatcgccatcctggacgacctgctgcccctgaccatcttcgacttcatccagctgctgctgatcgtgatcggcgccatcgccgtggtggccgtgctgcagccctacatcttcgtggccacagtgcccgtgatcgtggccttcatcatgctgagggcatacttcctgcagaccagccagcagctgaagcagctggagagcgaggggagatcccctatcttcacccacctggtgaccagcctgaagggactgtggaccctgcgcgctttcggccgccagccctacttcgagaccctgttccacaaggccctgaacctccacaccgccaactggttcctgtacctgtccaccctgaggtggttccagatgcggatcgagatgatcttcgtgatcttcttcatcgccgtgaccttcatctccatcctgaccactggcgaaggggagggtagggtgggcatcatcctcaccctggccatgaacatcatgtcaaccctgcagtgggccgtgaacagctccatcgacgtggacagcctgatgaggtccgtgtcccgggtgttcaagttcatcgacatgcccaccgagggcaagcccaccaagagcaccaagccatacaagaacggccagctgtccaaggtgatgatcatcgagaacagccacgtgaagaaggacgacatttggccctccggcgggcaaatgaccgtgaaggacctgaccgccaagtacaccgagggcggcaacgccatcctggagaacatcagcttctccatcagccccggtcagagggtcggactgctgggcaggactggcagcgggaagagcacactgctgtccgccttcctgcgcctgctgaacaccgaaggggagatccagatcgacggcgtgtcctgggacagcatcaccctgcagcagtggcgcaaggccttcggggtgatcccacagaaggtgttcatcttcagcggcaccttccggaagaacctggacccctacgagcagtggagcgaccaggagatctggaaggtggccgacgaggtgggcctgcgcagcgtgatcgagcagttccccggcaagctggacttcgtgctggtggacggcggctgcgtgctgagccacggccacaagcagctgatgtgcttggcccggagcgtgctgtccaaggccaagatcctcctgctggacgagccctcagcccacctcgaccccgtgacctaccagatcatccggcggaccctgaagcaggccttcgccgactgcaccgtgatcctgtgcgagcaccggatcgaggccatgctggagtgccagcagttcctggtgatcgaggagaacaaggtgcggcagtacgacagcatccagaagctgctgaacgagcggagcctgttccggcaggccatcagccccagcgaccgggtgaagctgttcccacaccgcaacagcagcaagtgcaagtccaagccccagatcgccgccctgaaggaggagaccgaggaggaggtgcaggacaccaggctg

SEQ ID NO: 7 - RNA, 4440 nt, synthetic construct
  source 1..4440: mol_type = other RNA
atgcagcggagccctctggagaaggccagcgtggtgagcaagctgttcttcagctggaccaggcccatcctgcgaaagggctacagacagaggctggagctgtccgacatctaccagattccatccgtggacagcgccgacaatctgagcgagaagctggagagggagtgggaccgcgagctggccagcaagaagaaccctaagctgatcaacgccctgcgccgctgcttcttctggaggttcatgttctacggcatcttcctgtacctgggcgaggtgaccaaggccgtccagcctctgctgctgggccgcatcatcgccagctacgatcccgacaacaaggaggaacgctccatcgccatctacctgggcatcggcctgtgtctgctgttcatcgtgcggaccctgctgctgcaccccgccatcttcggcctgcatcacatcggcatgcagatgaggatcgccatgttctccctgatctacaagaagaccctgaagctgtccagccgcgtgctggataagatcagcatcgggcagctggtgagcctgctgagcaacaacctgaacaagttcgacgaggggttggcgctggcccacttcgtgtggattgccccgctgcaggtggctctgctgatggggctgatctgggagctgctgcaggcctctgccttctgcgggctggggtttctgatcgtgctggccctgttccaagctggcctgggccgcatgatgatgaagtaccgcgatcagagggccggcaagatcagcgagcgcctggtgatcactagcgagatgatagagaacatccagagcgtgaaggcttactgttgggaggaggccatggagaagatgatcgagaacctgaggcagaccgagctgaagctgactagaaaggcagcctacgtgaggtatttcaactccagcgccttcttcttcagcggcttcttcgtggtgttcctgagcgtgctgccctacgccctgatcaagggcatcatcctgaggaagatcttcaccaccattagcttctgcatcgtgctgcgcatggccgtgaccaggcagttcccttgggccgtgcagacttggtacgacagcctgggagccatcaacaagatccaggactttctgcagaagcaggaatataagaccctggagtacaacctgaccaccaccgaggtggtgatggagaacgtgaccgccttctgggaggagggcttcggcgagctgttcgagaaggccaagcagaacaataacaaccgcaagaccagcaacggcgacgactccctcttcttcagcaactttagcctgctgggcacccctgtgctgaaggacatcaacttcaagatcgaaagaggccaactgctggccgtggccggatctaccggcgccggcaagaccagcctgctgatgatgatcatgggcgagctggagcccagcgagggcaagatcaagcacagcggccggatctccttctgctcccagttctcctggatcatgcccggcaccatcaaggagaacatcatcttcggcgtgagctacgacgagtacaggtaccggagcgtgatcaaggcctgccagctggaggaggacatctccaaatttgccgagaaggacaacattgtgctgggcgaaggcgggatcaccctgtccggtggccagcgtgcacgcatctccctggcccgggctgtgtacaaggacgccgacctgtacctgctggacagcccttttggctacctggacgtgctgaccgagaaggagatcttcgagtcctgcgtgtgtaagctgatggccaacaagaccagaatcctggtgaccagcaagatggagcatctgaagaaggccgacaagatcctgatcctgcacgaggggtccagctacttctacggcaccttcagcgagctgcagaacctgcagcccgacttcagctccaagctgatgggctgcgatagcttcgaccagttctccgccgagagaaggaactccattctgaccgagaccctgcaccgattctccctggagggagacgccccagtgagctggaccgagaccaagaagcagagcttcaagcagaccggcgagttcggagagaagcgcaagaactccatcctcaaccccatcaacagcatccggaagttcagcatcgtgcagaagacccctctgcagatgaacgggatcgaggaggacagcgacgagcccctggaacggcgactgtccctcgtgcccgacagcgagcagggcgaggccatcctgccccggatctccgtgatctccactgggcccaccctgcaagcccgacggcggcaaagcgtgctgaacctgatgacccacagcgtgaaccagggccagaatatccaccgcaagactacagccagcacccgcaaggtgagcctggctccccaggccaacctgaccgagctggacatctacagcaggaggctgagccaggagacaggcctggagatcagcgaggagatcaacgaggaggacctgaaggagtgcttcttcgacgacatggagtccatccccgccgtgaccacctggaacacctacctgagatacatcaccgtgcacaagagcctgatcttcgtgctgatctggtgcctggtgatcttcttggccgaggtagccgcctcactggtggtgctgtggctgctgggcaataccccactgcaggacaaggggaactccacccacagccggaacaacagctacgccgtgatcatcacctccaccagcagctactacgtgttctacatctacgtgggcgtggccgacacactgctggccatgggcttcttcagaggcctccctctggtgcacacactgatcaccgtgagcaagatcctgcaccacaagatgctgcacagcgtgctgcaggctcccatgtcaaccctgaacaccctgaaggccggcggcatcctgaacaggttcagcaaggacatcgccattctggacgatctgctgcccctgaccatcttcgacttcatccagctgctgctgatcgtgatcggggccatcgccgtggtggccgtgctgcagccctacatcttcgtggccacagtgcccgtgatcgtggccttcatcatgctgcgcgcctacttcctgcagacctcccagcagctgaagcagctggagagcgaaggccgcagccccatcttcacccacctggtgactagcctgaaggggctgtggaccctgcgcgccttcggcaggcagccctacttcgagaccctgttccacaaggctctgaacctgcacaccgccaactggttcctgtacctcagcaccctgcgctggttccagatgcggatcgagatgatcttcgtgatcttcttcatcgccgtgaccttcatctccatcctgaccaccggggaaggcgagggacgggtgggaatcatcctgaccctggccatgaatatcatgagcaccctgcagtgggccgtgaacagcagcatcgacgtggacagcctgatgcggtccgtgtcccgggtgttcaagttcatcgacatgcccaccgagggcaagcccaccaagagcaccaagccctacaagaacggccagctgagcaaggtgatgattatcgagaacagccacgtgaagaaggacgacatctggccttccggcggccagatgaccgtgaaggacctgaccgccaagtacaccgagggcggcaacgccatcctggagaacatcagcttctccattagccctggacagcgggtgggcctgttgggacggaccggcagtgggaagagcaccctgctgtccgccttcctgcggctgctgaacacggagggcgagatccagatcgacggggtgagctgggacagcatcaccctgcagcagtggcgaaaggccttcggcgtgatcccacagaaggtgtttattttctctggcacctttaggaagaacctggacccctacgagcagtggtccgaccaggagatctggaaggtggccgacgaggtgggcctgcggtcagtgatcgagcagttccccggcaagctggacttcgtgctggtggacggcggctgcgtgctgagccacggccacaagcagctgatgtgcctggcacgcagcgtgctgagcaaggccaagatcctgctgctggacgagccctccgcgcacctggatcccgtgacctaccagatcatcaggcggaccctgaagcaggccttcgccgactgcaccgtgatcctgtgcgagagcagaatcgaggctatgctggagtgccagcagttcctggtgatcgaggagaacaaggtgcggcagtacgactccatccagaagctgctgaacgagcgcagcctgttcagacaggctatctctcccagcgatcgcgtgaagctgttccctcacaggaacagcagcaagtgcaagtctaagccacagatcgccgccctgaaggaggagaccgaggaggaggtgcaggatacccgcctg

SEQ ID NO: 8 - RNA, 4344 nt, synthetic construct
  source 1..4344: mol_type = other RNA
atgcagcggagccctctggagaaggccagcgtggtgagcaagctgttcttcagctggaccaggcccatcctgcgaaagggctacagacagaggctggagctgtccgacatctaccagattccatccgtggacagcgccgacaatctgagcgagaagctggagagggagtgggaccgcgagctggccagcaagaagaaccctaagctgatcaacgccctgcgccgctgcttcttctggaggttcatgttctacggcatcttcctgtacctgggcgaggtgaccaaggccgtccagcctctgctgctgggccgcatcatcgccagctacgatcccgacaacaaggaggaacgctccatcgccatctacctgggcatcggcctgtgtctgctgttcatcgtgcggaccctgctgctgcaccccgccatcttcggcctgcatcacatcggcatgcagatgaggatcgccatgttctccctgatctacaagaagaccctgaagctgtccagccgcgtgctggataagatcagcatcgggcagctggtgagcctgctgagcaacaacctgaacaagttcgacgaggggttggcgctggcccacttcgtgtggattgccccgctgcaggtggctctgctgatggggctgatctgggagctgctgcaggcctctgccttctgcgggctggggtttctgatcgtgctggccctgttccaagctggcctgggccgcatgatgatgaagtaccgcgatcagagggccggcaagatcagcgagcgcctggtgatcactagcgagatgatagagaacatccagagcgtgaaggcttactgttgggaggaggccatggagaagatgatcgagaacctgaggcagaccgagctgaagctgactagaaaggcagcctacgtgaggtatttcaactccagcgccttcttcttcagcggcttcttcgtggtgttcctgagcgtgctgccctacgccctgatcaagggcatcatcctgaggaagatcttcaccaccattagcttctgcatcgtgctgcgcatggccgtgaccaggcagttcccttgggccgtgcagacttggtacgacagcctgggagccatcaacaagatccaggactttctgcagaagcaggaatataagaccctggagtacaacctgaccaccaccgaggtggtgatggagaacgtgaccgccttctgggaggagctgggcacccctgtgctgaaggacatcaacttcaagatcgaaagaggccaactgctggccgtggccggatctaccggcgccggcaagaccagcctgctgatgatgatcatgggcgagctggagcccagcgagggcaagatcaagcacagcggccggatctccttctgcccacagttctcctggatcatgcccggcaccatcaaggagaacatcatcttcggcgtgagctacgacgagtacaggtaccggagcgtgatcaaggcctgccagctggaggaggacatctccaaatttcccgagaaggacaacaccgtgctgggcgaaggcgggatcaccctgtccggtggccagcgtgcacgcatctccctggcccgggctgtgtacaaggacgccgacctgtacctgctggacagcccttttggctacctggacgtgctgaccgagaaggagatcttcgagtcctgcgtgtgtaagctgatggccaacaagaccagaatcctggtgaccagcaagatggagcatctgaagaaggccgacaagatcctgatcctgcacgaggggtccagctacttctacggcaccttcagcgagctgcagaacctgcagcccgacttcagctccaagctgatgggctgcgatagcttcgaccagttctccgccgagagaaggaactccattctgaccgagaccctgcaccgattctccctggagggagacgccccagtgagctggaccgagaccaagaagcagagcttcaagcagaccggcgagttcggagagaagcgcaagaactccatcctcaaccccatcaacagcatccggaagttcagcatcgtgcagaagacccctctgcagatgaacgggatcgaggaggacagcgacgagcccctggaacggcgactgtccctcgtgcccgacagcgagcagggcgaggccatcctgccccggatctccgtgatctccactgggcccaccctgcaagcccgacggcggcaaagcgtgctgaacctgatgacccacagcgtgaaccagggccagaatatccaccgcaagactacagccagcacccgcaaggtgagcctggctccccaggccaacctgaccgagctggacatctacagcaggaggctgagccaggagacaggcctggagatcagcgaggagatcaacgaggaggacctgaaggagtgcttcttcgacgacatggagtccatccccgccgtgaccacctggaacacctacctgagatacatcaccgtgcacaagagcctgatcttcgtgctgatctggtgcctggtgatcttcttggccgaggtagccgcctcactggtggtgctgtggctgctgggcaataccccactgcaggacaaggggaactccacccacagccggaacaacagctacgccgtgatcatcacctccaccagcagctactacgtgttctacatctacgtgggcgtggccgacacactgctggccatgggcttcttcagaggcctccctctggtgcacacactgatcaccgtgagcaagatcctgcaccacaagatgctgcacagcgtgctgcaggctcccatgtcaaccctgaacaccctgaaggccggcggcatcctgaacaggttcagcaaggacatcgccattctggacgatctgctgcccctgaccatcttcgacttcatccagctgctgctgatcgtgatcggggccatcgccgtggtggccgtgctgcagccctacatcttcgtggccacagtgcccgtgatcgtggccttcatcatgctgcgcgcctacttcctgcagacctcccagcagctgaagcagctggagagcgaaggccgcagccccatcttcacccacctggtgactagcctgaaggggctgtggaccctgcgcgccttcggcaggcagccctacttcgagaccctgttccacaaggctctgaacctgcacaccgccaactggttcctgtacctcagcaccctgcgctggttccagatgcggatcgagatgatcttcgtgatcttcttcatcgccgtgaccttcatctccatcctgaccaccggggaaggcgagggacgggtgggaatcatcctgaccctggccatgaatatcatgagcaccctgcagtgggccgtgaacagcagcatcgacgtggacagcctgatgcggtccgtgtcccgggtgttcaagttcatcgacatgcccaccgagggcaagcccaccaagagcaccaagccctacaagaacggccagctgagcaaggtgatgattatcgagaacagccacgtgaagaaggacgacatctggccttccggcggccagatgaccgtgaaggacctgaccgccaagtacaccgagggcggcaacgccatcctggagaacatcagcttctccattagccctggacagcgggtgggcctgttgggacggaccggcagtgggaagagcaccctgctgtccgccttcctgcggctgctgaacacggagggcgagatccagatcgacggggtgagctgggacagcatcaccctgcagcagtggcgaaaggccttcggcgtgatcccacagaaggtgtttattttctctggcacctttaggaagaacctggacccctacgagcagtggtccgaccaggagatctggaaggtggccgacgaggtgggcctgcggtcagtgatcgagcagttccccggcaagctggacttcgtgctggtggacggcggctgcgtgctgagccacggccacaagcagctgatgtgcctggcacgcagcgtgctgagcaaggccaagatcctgctgctggacgagccctccgcgcacctggatcccgtgacctaccagatcatcaggcggaccctgaagcaggccttcgccgactgcaccgtgatcctgtgcgagagcagaatcgaggctatgctggagtgccagcagttcctggtgatcgaggagaacaaggtgcggcagtacgactccatccagaagctgctgaacgagcgcagcctgttcagacaggctatctctcccagcgatcgcgtgaagctgttccctcacaggaacagcagcaagtgcaagtctaagccacagatcgccgccctgaaggaggagaccgaggaggaggtgcaggatacccgcctg

SEQ ID NO: 9 - RNA, 4440 nt, synthetic construct
  source 1..4440: mol_type = other RNA
atgcaaagaagtccattagagaaagcgtcggttgtgagcaagctgttcttcagctggaccaggcccatcctgcgaaagggctacagacagaggctggagctgtccgacatctaccagattccatccgtggacagcgccgacaatctgagcgagaagctggagagggagtgggaccgcgagctggccagcaagaagaaccctaagctgatcaacgccctgcgccgctgcttcttctggaggttcatgttctacggcatcttcctgtacctgggcgaggtgaccaaggccgtccagcctctgctgctgggccgcatcatcgccagctacgatcccgacaacaaggaggaacgctccatcgccatctacctgggcatcggcctgtgtctgctgttcatcgtgcggaccctgctgctgcaccccgccatcttcggcctgcatcacatcggcatgcagatgaggatcgccatgttctccctgatctacaagaagaccctgaagctgtccagccgcgtgctggataagatcagcatcgggcagctggtgagcctgctgagcaacaacctgaacaagttcgacgaggggttggcgctggcccacttcgtgtggattgccccgctgcaggtggctctgctgatggggctgatctgggagctgctgcaggcctctgccttctgcgggctggggtttctgatcgtgctggccctgttccaagctggcctgggccgcatgatgatgaagtaccgcgatcagagggccggcaagatcagcgagcgcctggtgatcactagcgagatgatagagaacatccagagcgtgaaggcttactgttgggaggaggccatggagaagatgatcgagaacctgaggcagaccgagctgaagctgactagaaaggcagcctacgtgaggtatttcaactccagcgccttcttcttcagcggcttcttcgtggtgttcctgagcgtgctgccctacgccctgatcaagggcatcatcctgaggaagatcttcaccaccattagcttctgcatcgtgctgcgcatggccgtgaccaggcagttcccttgggccgtgcagacttggtacgacagcctgggagccatcaacaagatccaggactttctgcagaagcaggaatataagaccctggagtacaacctgaccaccaccgaggtggtgatggagaacgtgaccgccttctgggaggagggcttcggcgagctgttcgagaaggccaagcagaacaataacaaccgcaagaccagcaacggcgacgactccctcttcttcagcaactttagcctgctgggcacccctgtgctgaaggacatcaacttcaagatcgaaagaggccaactgctggccgtggccggatctaccggcgccggcaagaccagcctgctgatgatgatcatgggcgagctggagcccagcgagggcaagatcaagcacagcggccggatctccttctgctcccagttctcctggatcatgcccggcaccatcaaggagaacatcatcttcggcgtgagctacgacgagtacaggtaccggagcgtgatcaaggcctgccagctggaggaggacatctccaaatttgccgagaaggacaacattgtgctgggcgaaggcgggatcaccctgtccggtggccagcgtgcacgcatctccctggcccgggctgtgtacaaggacgccgacctgtacctgctggacagcccttttggctacctggacgtgctgaccgagaaggagatcttcgagtcctgcgtgtgtaagctgatggccaacaagaccagaatcctggtgaccagcaagatggagcatctgaagaaggccgacaagatcctgatcctgcacgaggggtccagctacttctacggcaccttcagcgagctgcagaacctgcagcccgacttcagctccaagctgatgggctgcgatagcttcgaccagttctccgccgagagaaggaactccattctgaccgagaccctgcaccgattctccctggagggagacgccccagtgagctggaccgagaccaagaagcagagcttcaagcagaccggcgagttcggagagaagcgcaagaactccatcctcaaccccatcaacagcatccggaagttcagcatcgtgcagaagacccctctgcagatgaacgggatcgaggaggacagcgacgagcccctggaacggcgactgtccctcgtgcccgacagcgagcagggcgaggccatcctgccccggatctccgtgatctccactgggcccaccctgcaagcccgacggcggcaaagcgtgctgaacctgatgacccacagcgtgaaccagggccagaatatccaccgcaagactacagccagcacccgcaaggtgagcctggctccccaggccaacctgaccgagctggacatctacagcaggaggctgagccaggagacaggcctggagatcagcgaggagatcaacgaggaggacctgaaggagtgcttcttcgacgacatggagtccatccccgccgtgaccacctggaacacctacctgagatacatcaccgtgcacaagagcctgatcttcgtgctgatctggtgcctggtgatcttcttggccgaggtagccgcctcactggtggtgctgtggctgctgggcaataccccactgcaggacaaggggaactccacccacagccggaacaacagctacgccgtgatcatcacctccaccagcagctactacgtgttctacatctacgtgggcgtggccgacacactgctggccatgggcttcttcagaggcctccctctggtgcacacactgatcaccgtgagcaagatcctgcaccacaagatgctgcacagcgtgctgcaggctcccatgtcaaccctgaacaccctgaaggccggcggcatcctgaacaggttcagcaaggacatcgccattctggacgatctgctgcccctgaccatcttcgacttcatccagctgctgctgatcgtgatcggggccatcgccgtggtggccgtgctgcagccctacatcttcgtggccacagtgcccgtgatcgtggccttcatcatgctgcgcgcctacttcctgcagacctcccagcagctgaagcagctggagagcgaaggccgcagccccatcttcacccacctggtgactagcctgaaggggctgtggaccctgcgcgccttcggcaggcagccctacttcgagaccctgttccacaaggctctgaacctgcacaccgccaactggttcctgtacctcagcaccctgcgctggttccagatgcggatcgagatgatcttcgtgatcttcttcatcgccgtgaccttcatctccatcctgaccaccggggaaggcgagggacgggtgggaatcatcctgaccctggccatgaatatcatgagcaccctgcagtgggccgtgaacagcagcatcgacgtggacagcctgatgcggtccgtgtcccgggtgttcaagttcatcgacatgcccaccgagggcaagcccaccaagagcaccaagccctacaagaacggccagctgagcaaggtgatgattatcgagaacagccacgtgaagaaggacgacatctggccttccggcggccagatgaccgtgaaggacctgaccgccaagtacaccgagggcggcaacgccatcctggagaacatcagcttctccattagccctggacagcgggtgggcctgttgggacggaccggcagtgggaagagcaccctgctgtccgccttcctgcggctgctgaacacggagggcgagatccagatcgacggggtgagctgggacagcatcaccctgcagcagtggcgaaaggccttcggcgtgatcccacagaaggtgtttattttctctggcacctttaggaagaacctggacccctacgagcagtggtccgaccaggagatctggaaggtggccgacgaggtgggcctgcggtcagtgatcgagcagttccccggcaagctggacttcgtgctggtggacggcggctgcgtgctgagccacggccacaagcagctgatgtgcctggcacgcagcgtgctgagcaaggccaagatcctgctgctggacgagccctccgcgcacctggatcccgtgacctaccagatcatcaggcggaccctgaagcaggccttcgccgactgcaccgtgatcctgtgcgagagcagaatcgaggctatgctggagtgccagcagttcctggtgatcgaggagaacaaggtgcggcagtacgactccatccagaagctgctgaacgagcgcagcctgttcagacaggctatctctcccagcgatcgcgtgaagctgttccctcacaggaacagcagcaagtgcaagtctaagccacagatcgccgccctgaaggaggagaccgaggaggaggtgcaggatacccgcctg

SEQ ID NO: 10 - RNA, 4736 nt, synthetic construct
  source 1..4736: mol_type = other RNA
  modified_base 1: mod_base = OTHER; note = 7-Methylguanosine
  modified_base 8: mod_base = OTHER; note = N1-methylpseudouracil
  modified_base 16: mod_base = OTHER; note = N1-methylpseudouracil
  modified_base 17: mod_base = OTHER; note = N1-methylpseudouracil
  modified_base 18: mod_base = OTHER; note = N1-methylpseudouracil
  modified_base 21: mod_base = OTHER; note = N1-methylpseudouracil
  modified_base 23: mod_base = OTHER; note = N1-methylpseudouracil
  modified_base 24: mod_base = OTHER; note = N1-methylpseudouracil
  modified_base 29: mod_base = OTHER; note = N1-methylpseudouracil
  modified_base 30: mod_base = OTHER; note = N1-methylpseudouracil
  modified_base 34: mod_base = OTHER; note = N1-methylpseudouracil
  modified_base 35: mod_base = OTHER; note = N1-methylpseudouracil
  modified_base 36: mod_base = OTHER; note = N1-methylpseudouracil
  modified_base 38: mod_base = OTHER; note = N1-methylpseudouracil
  modified_base 39: mod_base = OTHER; note = N1-methylpseudouracil
  modified_base 40: mod_base = OTHER; note = N1-methylpseudouracil
  modified_base 41: mod_base = OTHER; note = N1-methylpseudouracil
  modified_base 44: mod_base = OTHER; note = N1-methylpseudouracil
  modified_base 45: mod_base = OTHER; note = N1-methylpseudouracil
  modified_base 46: mod_base = OTHER; note = N1-methylpseudouracil
  modified_base 47: mod_base = OTHER; note = N1-methylpseudouracil
  modified_base 49: mod_base = OTHER; note = N1-methylpseudouracil
  modified_base 56: mod_base = OTHER; note = N1-methylpseudouracil
  modified_base 64: mod_base = OTHER; note = N1-methylpseudouracil
  modified_base 65: mod_base = OTHER; note = N1-methylpseudouracil
  modified_base 66: mod_base = OTHER; note = N1-methylpseudouracil
  modified_base 67: mod_base = OTHER; note = N1-methylpseudouracil
  modified_base 68: mod_base = OTHER; note = N1-methylpseudouracil
  modified_base 70: mod_base = OTHER; note = N1-methylpseudouracil
  modified_base 71: mod_base = OTHER; note = N1-methylpseudouracil
  modified_base 73: mod_base = OTHER; note = N1-methylpseudouracil
  modified_base 79: mod_base = OTHER; note = N1-methylpseudouracil
  modified_base 92: mod_base = OTHER; note = N1-methylpseudouracil
  modified_base 94: mod_base = OTHER; note = N1-methylpseudouracil
  modified_base 109: mod_base = OTHER; note = N1-methylpseudouracil
  modified_base 112: mod_base = OTHER; note = N1-methylpseudouracil
  modified_base 121: mod_base = OTHER; note = N1-methylpseudouracil
  modified_base 123: mod_base = OTHER; note = N1-methylpseudouracil
  modified_base 124: mod_base = OTHER; note = N1-methylpseudouracil
  modified_base 126: mod_base = OTHER; note = N1-methylpseudouracil
  modified_base 127: mod_base = OTHER; note = N1-methylpseudouracil
  modified_base 132: mod_base = OTHER; note = N1-methylpseudouracil
  modified_base 145: mod_base = OTHER; note = N1-methylpseudouracil
  modified_base 148: mod_base = OTHER; note = N1-methylpseudouracil
  modified_base 159: mod_base = OTHER; note = N1-methylpseudouracil
  modified_base 172: mod_base = OTHER; note = N1-methylpseudouracil
  modified_base 178: mod_base = OTHER; note = N1-methylpseudouracil
  modified_base 180: mod_base = OTHER; note = N1-methylpseudouracil
  modified_base 187: mod_base = OTHER; note = N1-methylpseudouracil
  modified_base 189: mod_base = OTHER; note = N1-methylpseudouracil
  modified_base 196: mod_base = OTHER; note = N1-methylpseudouracil
  modified_base 197: mod_base = OTHER; note = N1-methylpseudouracil
  modified_base 201: mod_base = OTHER; note = N1-methylpseudouracil
  modified_base 205: mod_base = OTHER; note = N1-methylpseudouracil
  modified_base 221: mod_base = OTHER; note = N1-methylpseudouracil
  modified_base 223: mod_base = OTHER; note = N1-methylpseudouracil
  modified_base 235: mod_base = OTHER; note = N1-methylpseudouracil
  modified_base 246: mod_base = OTHER; note = N1-methylpseudouracil
  modified_base 259: mod_base = OTHER; note = N1-methylpseudouracil
  modified_base 278: mod_base = OTHER; note = N1-methylpseudouracil
  modified_base 283: mod_base = OTHER; note = N1-methylpseudouracil
  modified_base 286: mod_base = OTHER; note = N1-methylpseudouracil
  modified_base 295: mod_base = OTHER; note = N1-methylpseudouracil
  modified_base 303: mod_base = OTHER; note = N1-methylpseudouracil
  modified_base 306: mod_base = OTHER; note = N1-methylpseudouracil
  modified_base 307: mod_base = OTHER; note = N1-methylpseudouracil
  modified_base 309: mod_base = OTHER; note = N1-methylpseudouracil
  modified_base 310: mod_base = OTHER; note = N1-methylpseudouracil
  modified_base 312: mod_base = OTHER; note = N1-methylpseudouracil
  modified_base 318: mod_base = OTHER; note = N1-methylpseudouracil
  modified_base 319: mod_base = OTHER; note = N1-methylpseudouracil
  modified_base 322: mod_base = OTHER; note = N1-methylpseudouracil
  modified_base 324: mod_base = OTHER; note = N1-methylpseudouracil
  modified_base 325: mod_base = OTHER; note = N1-methylpseudouracil
  modified_base 327: mod_base = OTHER; note = N1-methylpseudouracil
  modified_base 334: mod_base = OTHER; note = N1-methylpseudouracil
  modified_base 336: mod_base = OTHER; note = N1-methylpseudouracil
  modified_base 337: mod_base = OTHER; note = N1-methylpseudouracil
  modified_base 340: mod_base = OTHER; note = N1-methylpseudouracil
  modified_base 342: mod_base = OTHER; note = N1-methylpseudouracil
  modified_base 346: mod_base = OTHER; note = N1-methylpseudouracil
  modified_base 355: mod_base = OTHER; note = N1-methylpseudouracil
  modified_base 367: mod_base = OTHER; note = N1-methylpseudouracil
  modified_base 374: mod_base = OTHER; note = N1-methylpseudouracil
  modified_base 376: mod_base = OTHER; note = N1-methylpseudouracil
  modified_base 379: mod_base = OTHER; note = N1-methylpseudouracil
  modified_base 382: mod_base = OTHER; note = N1-methylpseudouracil
  modified_base 391: mod_base = OTHER; note = N1-methylpseudouracil
  modified_base 394: mod_base = OTHER; note = N1-methylpseudouracil
  modified_base 402: mod_base = OTHER; note = N1-methylpseudouracil
  modified_base 407: mod_base = OTHER; note = N1-methylpseudouracil
  modified_base 429: mod_base = OTHER; note = N1-methylpseudouracil
  modified_base 433: mod_base = OTHER; note = N1-methylpseudouracil
  modified_base 439: mod_base = OTHER; note = N1-methylpseudouracil
  modified_base 441: mod_base = OTHER; note = N1-methylpseudouracil
  modified_base 445: mod_base = OTHER; note = N1-methylpseudouracil
  modified_base 451: mod_base = OTHER; note = N1-methylpseudouracil
  modified_base 457: mod_base = OTHER; note = N1-methylpseudouracil
  modified_base 459: mod_base = OTHER; note = N1-methylpseudouracil
  modified_base 461: mod_base = OTHER; note = N1-methylpseudouracil
  modified_base 463: mod_base = OTHER; note = N1-methylpseudouracil
  modified_base 466: mod_base = OTHER; note = N1-methylpseudouracil
  modified_base 468: mod_base = OTHER; note = N1-methylpseudouracil
  modified_base 469: mod_base = OTHER; note = N1-methylpseudouracil
  modified_base 472: mod_base = OTHER; note = N1-methylpseudouracil
  modified_base 475: mod_base = OTHER; note = N1-methylpseudouracil
  modified_base 484: mod_base = OTHER; note = N1-methylpseudouracil
  modified_base 487: mod_base = OTHER; note = N1-methylpseudouracil
  modified_base 490: mod_base = OTHER; note = N1-methylpseudouracil
  modified_base 502: mod_base = OTHER; note = N1-methylpseudouracil
  modified_base 504: mod_base = OTHER; note = N1-methylpseudouracil
  modified_base 505: mod_base = OTHER; note = N1-methylpseudouracil
  modified_base 511: mod_base = OTHER; note = N1-methylpseudouracil
  modified_base 515: mod_base = OTHER; note = N1-methylpseudouracil
  modified_base 520: mod_base = OTHER; note = N1-methylpseudouracil
  modified_base 526: mod_base = OTHER; note = N1-methylpseudouracil
  modified_base 532: mod_base = OTHER; note = N1-methylpseudouracil
  modified_base 538: mod_base = OTHER; note = N1-methylpseudouracil
  modified_base 544: mod_base = OTHER; note = N1-methylpseudouracil
  modified_base 546: mod_base = OTHER; note = N1-methylpseudouracil
  modified_base 547: mod_base = OTHER; note = N1-methylpseudouracil
  modified_base 549: mod_base = OTHER; note = N1-methylpseudouracil
  modified_base 553: mod_base = OTHER; note = N1-methylpseudouracil
  modified_base 556: mod_base = OTHER; note = N1-methylpseudouracil
  modified_base 558: mod_base = OTHER; note = N1-methylpseudouracil
  modified_base 571: mod_base = OTHER; note = N1-methylpseudouracil
  modified_base 577: mod_base = OTHER; note = N1-methylpseudouracil
  modified_base 579: mod_base = OTHER; note = N1-methylpseudouracil
  modified_base 589: mod_base = OTHER; note = N1-methylpseudouracil
  modified_base 592: mod_base = OTHER; note = N1-methylpseudouracil
  modified_base 596: mod_base = OTHER; note = N1-methylpseudouracil
  modified_base 601: mod_base = OTHER; note = N1-methylpseudouracil
  modified_base 607: mod_base = OTHER; note = N1-methylpseudouracil
  modified_base 616: mod_base = OTHER; note = N1-methylpseudouracil
  modified_base 619: mod_base = OTHER; note = N1-methylpseudouracil
  modified_base 625: mod_base = OTHER; note = N1-methylpseudouracil
  modified_base 628: mod_base = OTHER; note = N1-methylpseudouracil
  modified_base 640: mod_base = OTHER; note = N1-methylpseudouracil
  modified_base 648: mod_base = OTHER; note = N1-methylpseudouracil
  modified_base 649: mod_base = OTHER; note = N1-methylpseudouracil
  modified_base 660: mod_base = OTHER; note = N1-methylpseudouracil
  modified_base 661: mod_base = OTHER; note = N1-methylpseudouracil
  modified_base 667: mod_base = OTHER; note = N1-methylpseudouracil
  modified_base 675: mod_base = OTHER; note = N1-methylpseudouracil
  modified_base 676: mod_base = OTHER; note = N1-methylpseudouracil
  modified_base 679: mod_base = OTHER; note = N1-methylpseudouracil
  modified_base 681: mod_base = OTHER; note = N1-methylpseudouracil
  modified_base 685: mod_base = OTHER; note = N1-methylpseudouracil
  modified_base 686: mod_base = OTHER; note = N1-methylpseudouracil
  modified_base 694: mod_base = OTHER; note = N1-methylpseudouracil
  modified_base 700: mod_base = OTHER; note = N1-methylpseudouracil
  modified_base 704: mod_base = OTHER; note = N1-methylpseudouracil
  modified_base 706: mod_base = OTHER; note = N1-methylpseudouracil
  modified_base 709: mod_base = OTHER; note = N1-methylpseudouracil
  modified_base 712: mod_base = OTHER; note = N1-methylpseudouracil
  modified_base 718: mod_base = OTHER; note = N1-methylpseudouracil
  modified_base 721: mod_base = OTHER; note = N1-methylpseudouracil
  modified_base 723: mod_base = OTHER; note = N1-methylpseudouracil
  modified_base 730: mod_base = OTHER; note = N1-methylpseudouracil
  modified_base 733: mod_base = OTHER; note = N1-methylpseudouracil
  modified_base 741: mod_base = OTHER; note = N1-methylpseudouracil
  modified_base 743: mod_base = OTHER; note = N1-methylpseudouracil
  modified_base 747: mod_base = OTHER; note = N1-methylpseudouracil
  modified_base 748: mod_base = OTHER; note = N1-methylpseudouracil
  modified_base 750: mod_base = OTHER; note = N1-methylpseudouracil
  modified_base 757: mod_base = OTHER; note = N1-methylpseudouracil
  modified_base 762: mod_base = OTHER; note = N1-methylpseudouracil
  modified_base 763: mod_base = OTHER; note = N1-methylpseudouracil
  modified_base 764: mod_base = OTHER; note = N1-methylpseudouracil
  modified_base 766: mod_base = OTHER; note = N1-methylpseudouracil
  modified_base 769: mod_base = OTHER; note = N1-methylpseudouracil
  modified_base 772: mod_base = OTHER; note = N1-methylpseudouracil
  modified_base 775: mod_base = OTHER; note = N1-methylpseudouracil
  modified_base 781: mod_base = OTHER; note = N1-methylpseudouracil
  modified_base 783: mod_base = OTHER; note = N1-methylpseudouracil
  modified_base 784: mod_base = OTHER; note = N1-methylpseudouracil
  modified_base 791: mod_base = OTHER; note = N1-methylpseudouracil
  modified_base 796: mod_base = OTHER; note = N1-methylpseudouracil
  modified_base 805: mod_base = OTHER; note = N1-methylpseudouracil
  modified_base 808: mod_base = OTHER; note = N1-methylpseudouracil
  modified_base 811: mod_base = OTHER; note = N1-methylpseudouracil
  modified_base 816: mod_base = OTHER; note = N1-methylpseudouracil
  modified_base 824: mod_base = OTHER; note = N1-methylpseudouracil
  modified_base 841: mod_base = OTHER; note = N1-methylpseudouracil
  modified_base 853: mod_base = OTHER; note = N1-methylpseudouracil
  modified_base 856: mod_base = OTHER; note = N1-methylpseudouracil
  modified_base 859: mod_base = OTHER; note = N1-methylpseudouracil
  modified_base 863: mod_base = OTHER; note = N1-methylpseudouracil
  modified_base 871: mod_base = OTHER; note = N1-methylpseudouracil
  modified_base 874: mod_base = OTHER; note = N1-methylpseudouracil
  modified_base 883: mod_base = OTHER; note = N1-methylpseudouracil
  modified_base 892: mod_base = OTHER; note = N1-methylpseudouracil
  modified_base 899: mod_base = OTHER; note = N1-methylpseudouracil
  modified_base 900: mod_base = OTHER; note = N1-methylpseudouracil
  modified_base 903: mod_base = OTHER; note = N1-methylpseudouracil
  modified_base 905: mod_base = OTHER; note = N1-methylpseudouracil
  modified_base 906: mod_base = OTHER; note = N1-methylpseudouracil
  modified_base 919: mod_base = OTHER; note = N1-methylpseudouracil
  modified_base 928: mod_base = OTHER; note = N1-methylpseudouracil
  modified_base 931: mod_base = OTHER; note = N1-methylpseudouracil
  modified_base 940: mod_base = OTHER; note = N1-methylpseudouracil
  modified_base 955: mod_base = OTHER; note = N1-methylpseudouracil
  modified_base 961: mod_base = OTHER; note = N1-methylpseudouracil
  modified_base 965: mod_base = OTHER; note = N1-methylpseudouracil
  modified_base 978: mod_base = OTHER; note = N1-methylpseudouracil
  modified_base 982: mod_base = OTHER; note = N1-methylpseudouracil
  modified_base 987: mod_base = OTHER; note = N1-methylpseudouracil
  modified_base 989: mod_base = OTHER; note = N1-methylpseudouracil
  modified_base 990: mod_base = OTHER; note = N1-methylpseudouracil
  modified_base 991: mod_base = OTHER; note = N1-methylpseudouracil
  modified_base 996: mod_base = OTHER; note = N1-methylpseudouracil
  modified_base 1005: mod_base = OTHER; note = N1-methylpseudouracil
  modified_base 1006: mod_base = OTHER; note = N1-methylpseudouracil
  modified_base 1008: mod_base = OTHER; note = N1-methylpseudouracil
  modified_base 1009: mod_base = OTHER; note = N1-methylpseudouracil
  modified_base 1011: mod_base = OTHER; note = N1-methylpseudouracil
  modified_base 1012: mod_base = OTHER; note = N1-methylpseudouracil
  modified_base 1020: mod_base = OTHER; note = N1-methylpseudouracil
  modified_base 1021: mod_base = OTHER; note = N1-methylpseudouracil
  modified_base 1023: mod_base = OTHER; note = N1-methylpseudouracil
  modified_base 1024: mod_base = OTHER; note = N1-methylpseudouracil
  modified_base 1027: mod_base = OTHER; note = N1-methylpseudouracil
  modified_base 1030: mod_base = OTHER; note = N1-methylpseudouracil
  modified_base 1032: mod_base = OTHER; note = N1-methylpseudouracil
  modified_base 1033: mod_base = OTHER; note = N1-methylpseudouracil
  modified_base 1036: mod_base = OTHER; note = N1-methylpseudouracil
  modified_base 1042: mod_base = OTHER; note = N1-methylpseudouracil
  modified_base 1045: mod_base = OTHER; note = N1-methylpseudouracil
  modified_base 1050: mod_base = OTHER; note = N1-methylpseudouracil
  modified_base 1057: mod_base = OTHER; note = N1-methylpseudouracil
  modified_base 1060: mod_base = OTHER; note = N1-methylpseudouracil
  modified_base 1069: mod_base = OTHER; note = N1-methylpseudouracil
  modified_base 1072: mod_base = OTHER; note = N1-methylpseudouracil
  modified_base 1075: mod_base = OTHER; note = N1-methylpseudouracil
  modified_base 1084: mod_base = OTHER; note = N1-methylpseudouracil
  modified_base 1086: mod_base = OTHER; note = N1-methylpseudouracil
  modified_base 1087: mod_base = OTHER; note = N1-methylpseudouracil
  modified_base 1096: mod_base = OTHER; note = N1-methylpseudouracil
  modified_base 1097: mod_base = OTHER; note = N1-methylpseudouracil
  modified_base 1101: mod_base = OTHER; note = N1-methylpseudouracil
  modified_base 1102: mod_base = OTHER; note = N1-methylpseudouracil
  modified_base 1104: mod_base = OTHER; note = N1-methylpseudouracil
  modified_base 1108: mod_base = OTHER; note = N1-methylpseudouracil
  modified_base 1111: mod_base = OTHER; note = N1-methylpseudouracil
  modified_base 1114: mod_base = OTHER; note = N1-methylpseudouracil
  modified_base 1120: mod_base = OTHER; note = N1-methylpseudouracil
  modified_base 1126: mod_base = OTHER; note = N1-methylpseudouracil
  modified_base 1137: mod_base = OTHER; note = N1-methylpseudouracil
  modified_base 1138: mod_base = OTHER; note = N1-methylpseudouracil
  modified_base 1142: mod_base = OTHER; note = N1-methylpseudouracil
  modified_base 1143: mod_base = OTHER; note = N1-methylpseudouracil
  modified_base 1150: mod_base = OTHER; note = N1-methylpseudouracil
  modified_base 1157: mod_base = OTHER; note = N1-methylpseudouracil
  modified_base 1158: mod_base = OTHER; note = N1-methylpseudouracil
  modified_base 1161: mod_base = OTHER; note = N1-methylpseudouracil
  modified_base 1171: mod_base = OTHER; note = N1-methylpseudouracil
  modified_base 1180: mod_base = OTHER; note = N1-methylpseudouracil
  modified_base 1189: mod_base = OTHER; note = N1-methylpseudouracil
  modified_base 1197: mod_base = OTHER; note = N1-methylpseudouracil
  modified_base 1198: mod_base = OTHER; note = N1-methylpseudouracil
  modified_base 1199: mod_base = OTHER; note = N1-methylpseudouracil
  modified_base 1201: mod_base = OTHER; note = N1-methylpseudouracil
  modified_base 1215: mod_base = OTHER; note = N1-methylpseudouracil
  modified_base 1217: mod_base = OTHER; note = N1-methylpseudouracil
  modified_base 1225: mod_base = OTHER; note = N1-methylpseudouracil
  modified_base 1230: mod_base = OTHER; note = N1-methylpseudouracil
  modified_base 1237: mod_base = OTHER; note = N1-methylpseudouracil
  modified_base 1252: mod_base = OTHER; note = N1-methylpseudouracil
  modified_base 1255: mod_base = OTHER; note = N1-methylpseudouracil
  modified_base 1258: mod_base = OTHER; note = N1-methylpseudouracil
  modified_base 1267: mod_base = OTHER; note = N1-methylpseudouracil
  modified_base 1275: mod_base = OTHER; note = N1-methylpseudouracil
  modified_base 1276: mod_base = OTHER; note = N1-methylpseudouracil
  modified_base 1278: mod_base = OTHER; note = N1-methylpseudouracil
  modified_base 1290: mod_base = OTHER; note = N1-methylpseudouracil
  modified_base 1291: mod_base = OTHER; note = N1-methylpseudouracil
  modified_base 1300: mod_base = OTHER; note = N1-methylpseudouracil
  modified_base 1302: mod_base = OTHER; note = N1-methylpseudouracil
  modified_base 1303: mod_base = OTHER; note = N1-methylpseudouracil
  modified_base 1325: mod_base = OTHER; note = N1-methylpseudouracil
  modified_base 1356: mod_base = OTHER; note = N1-methylpseudouracil
  modified_base 1360: mod_base = OTHER; note = N1-methylpseudouracil
  modified_base 1362: mod_base = OTHER; note = N1-methylpseudouracil
  modified_base 1363: mod_base = OTHER; note = N1-methylpseudouracil
  modified_base 1365: mod_base = OTHER; note = N1-methylpseudouracil
  modified_base 1366: mod_base = OTHER; note = N1-methylpseudouracil
  modified_base 1374: mod_base = OTHER; note = N1-methylpseudouracil
  modified_base 1375: mod_base = OTHER; note = N1-methylpseudouracil
  modified_base 1376: mod_base = OTHER; note = N1-methylpseudouracil
  modified_base 1381: mod_base = OTHER; note = N1-methylpseudouracil
  modified_base 1384: mod_base = OTHER; note = N1-methylpseudouracil
  modified_base 1394: mod_base = OTHER; note = N1-methylpseudouracil
  modified_base 1396: mod_base = OTHER; note = N1-methylpseudouracil
  modified_base 1399: mod_base = OTHER; note = N1-methylpseudouracil
  modified_base 1408: mod_base = OTHER; note = N1-methylpseudouracil
  modified_base 1413: mod_base = OTHER; note = N1-methylpseudouracil
  modified_base 1414: mod_base = OTHER; note = N1-methylpseudouracil
  modified_base 1420: mod_base = OTHER; note = N1-methylpseudouracil
  modified_base 1435: mod_base = OTHER; note = N1-methylpseudouracil
  modified_base 1438: mod_base = OTHER; note = N1-methylpseudouracil
  modified_base 1444: mod_base = OTHER; note = N1-methylpseudouracil
  modified_base 1452: mod_base = OTHER; note = N1-methylpseudouracil
  modified_base 1454: mod_base = OTHER; note = N1-methylpseudouracil
  modified_base 1477: mod_base = OTHER; note = N1-methylpseudouracil
  modified_base 1480: mod_base = OTHER; note = N1-methylpseudouracil
  modified_base 1483: mod_base = OTHER; note = N1-methylpseudouracil
  modified_base 1486: mod_base = OTHER; note = N1-methylpseudouracil
  modified_base 1489: mod_base = OTHER; note = N1-methylpseudouracil
  modified_base 1492: mod_base = OTHER; note = N1-methylpseudouracil
  modified_base 1501: mod_base = OTHER; note = N1-methylpseudouracil
  modified_base 1522: mod_base = OTHER; note = N1-methylpseudouracil
  modified_base 1540: mod_base = OTHER; note = N1-methylpseudouracil
  modified_base 1542: mod_base = OTHER; note = N1-methylpseudouracil
  modified_base 1545: mod_base = OTHER; note = N1-methylpseudouracil
  modified_base 1546: mod_base = OTHER; note = N1-methylpseudouracil
  modified_base 1548: mod_base = OTHER; note = N1-methylpseudouracil
  modified_base 1551: mod_base = OTHER; note = N1-methylpseudouracil
  modified_base 1557: mod_base = OTHER; note = N1-methylpseudouracil
  modified_base 1558: mod_base = OTHER; note = N1-methylpseudouracil
  modified_base 1560: mod_base = OTHER; note = N1-methylpseudouracil
  modified_base 1563: mod_base = OTHER; note = N1-methylpseudouracil
  modified_base 1567: mod_base = OTHER; note = N1-methylpseudouracil
  modified_base 1570: mod_base = OTHER; note = N1-methylpseudouracil
  modified_base 1582: mod_base = OTHER; note = N1-methylpseudouracil
  modified_base 1594: mod_base = OTHER; note = N1-methylpseudouracil
  modified_base 1597: mod_base = OTHER; note = N1-methylpseudouracil
  modified_base 1599: mod_base = OTHER; note = N1-methylpseudouracil
  modified_base 1600: mod_base = OTHER; note = N1-methylpseudouracil
  modified_base 1606: mod_base = OTHER; note = N1-methylpseudouracil
  modified_base 1611: mod_base = OTHER; note = N1-methylpseudouracil
  modified_base 1620: mod_base = OTHER; note = N1-methylpseudouracil
  modified_base 1626: mod_base = OTHER; note = N1-methylpseudouracil
  modified_base 1636: mod_base = OTHER; note = N1-methylpseudouracil
  modified_base 1639: mod_base = OTHER; note = N1-methylpseudouracil
  modified_base 1647: mod_base = OTHER; note = N1-methylpseudouracil
  modified_base 1654: mod_base = OTHER; note = N1-methylpseudouracil
  modified_base 1666: mod_base = OTHER; note = N1-methylpseudouracil
  modified_base 1668: mod_base = OTHER; note = N1-methylpseudouracil
  modified_base 1674: mod_base = OTHER; note = N1-methylpseudouracil
  modified_base 1675: mod_base = OTHER; note = N1-methylpseudouracil
  modified_base 1676: mod_base = OTHER; note = N1-methylpseudouracil
  modified_base 1693: mod_base = OTHER; note = N1-methylpseudouracil
  modified_base 1694: mod_base = OTHER; note = N1-methylpseudouracil
  modified_base 1696: mod_base = OTHER; note = N1-methylpseudouracil
  modified_base 1699: mod_base = OTHER; note = N1-methylpseudouracil
  modified_base 1714: mod_base = OTHER; note = N1-methylpseudouracil
  modified_base 1720: mod_base = OTHER; note = N1-methylpseudouracil
  modified_base 1722: mod_base = OTHER; note = N1-methylpseudouracil
  modified_base 1727: mod_base = OTHER; note = N1-methylpseudouracil
  modified_base 1736: mod_base = OTHER; note = N1-methylpseudouracil
  modified_base 1744: mod_base = OTHER; note = N1-methylpseudouracil
  modified_base 1746: mod_base = OTHER; note = N1-methylpseudouracil
  modified_base 1750: mod_base = OTHER; note = N1-methylpseudouracil
  modified_base 1760: mod_base = OTHER; note = N1-methylpseudouracil
  modified_base 1762: mod_base = OTHER; note = N1-methylpseudouracil
  modified_base 1764: mod_base = OTHER; note = N1-methylpseudouracil
  modified_base 1780: mod_base = OTHER; note = N1-methylpseudouracil
  modified_base 1782: mod_base = OTHER; note = N1-methylpseudouracil
  modified_base 1786: mod_base = OTHER; note = N1-methylpseudouracil
  modified_base 1789: mod_base = OTHER; note = N1-methylpseudouracil
  modified_base 1799: mod_base = OTHER; note = N1-methylpseudouracil
  modified_base 1800: mod_base = OTHER; note = N1-methylpseudouracil
  modified_base 1801: mod_base = OTHER; note = N1-methylpseudouracil
  modified_base 1802: mod_base = OTHER; note = N1-methylpseudouracil
  modified_base 1806: mod_base = OTHER; note = N1-methylpseudouracil
  modified_base 1810: mod_base = OTHER; note = N1-methylpseudouracil
  modified_base 1816: mod_base = OTHER; note = N1-methylpseudouracil
  modified_base 1819: mod_base = OTHER; note = N1-methylpseudouracil
  modified_base 1834: mod_base = OTHER; note = N1-methylpseudouracil
  modified_base 1836: mod_base = OTHER; note = N1-methylpseudouracil
  modified_base 1837: mod_base = OTHER; note = N1-methylpseudouracil
  modified_base 1842: mod_base = OTHER; note = N1-methylpseudouracil
  modified_base 1845: mod_base = OTHER; note = N1-methylpseudouracil
  modified_base 1849: mod_base = OTHER; note = N1-methylpseudouracil
  modified_base 1851: mod_base = OTHER; note = N1-methylpseudouracil
  modified_base 1853: mod_base = OTHER; note = N1-methylpseudouracil
  modified_base 1858: mod_base = OTHER; note = N1-methylpseudouracil
  modified_base 1861: mod_base = OTHER; note = N1-methylpseudouracil
  modified_base 1879: mod_base = OTHER; note = N1-methylpseudouracil
  modified_base 1882: mod_base = OTHER; note = N1-methylpseudouracil
  modified_base 1885: mod_base = OTHER; note = N1-methylpseudouracil
  modified_base 1897: mod_base = OTHER; note = N1-methylpseudouracil
  modified_base 1904: mod_base = OTHER; note = N1-methylpseudouracil
  modified_base 1906: mod_base = OTHER; note = N1-methylpseudouracil
  modified_base 1924: mod_base = OTHER; note = N1-methylpseudouracil
  modified_base 1927: mod_base = OTHER; note = N1-methylpseudouracil
  modified_base 1930: mod_base = OTHER; note = N1-methylpseudouracil
  modified_base 1933: mod_base = OTHER; note = N1-methylpseudouracil
  modified_base 1944: mod_base = OTHER; note = N1-methylpseudouracil
  modified_base 1950: mod_base = OTHER; note = N1-methylpseudouracil
  modified_base 1953: mod_base = OTHER; note = N1-methylpseudouracil
  modified_base 1954: mod_base = OTHER; note = N1-methylpseudouracil
  modified_base 1956: mod_base = OTHER; note = N1-methylpseudouracil
  modified_base 1965: mod_base = OTHER; note = N1-methylpseudouracil
  modified_base 1966: mod_base = OTHER; note = N1-methylpseudouracil
  modified_base 1975: mod_base = OTHER; note = N1-methylpseudouracil
  modified_base 1984: mod_base = OTHER; note = N1-methylpseudouracil
  modified_base 1995: mod_base = OTHER; note = N1-methylpseudouracil
  modified_base 1996: mod_base = OTHER; note = N1-methylpseudouracil
  modified_base 2001: mod_base = OTHER; note = N1-methylpseudouracil
  modified_base 2008: mod_base = OTHER; note = N1-methylpseudouracil
  modified_base 2011: mod_base = OTHER; note = N1-methylpseudouracil
  modified_base 2016: mod_base = OTHER; note = N1-methylpseudouracil
  modified_base 2021: mod_base = OTHER; note = N1-methylpseudouracil
  modified_base 2025: mod_base = OTHER; note = N1-methylpseudouracil
  modified_base 2026: mod_base = OTHER; note = N1-methylpseudouracil
  modified_base 2034: mod_base = OTHER; note = N1-methylpseudouracil
  modified_base 2035: mod_base = OTHER; note = N1-methylpseudouracil
  modified_base 2037: mod_base = OTHER; note = N1-methylpseudouracil
  modified_base 2055: mod_base = OTHER; note = N1-methylpseudouracil
  modified_base 2059: mod_base = OTHER; note = N1-methylpseudouracil
  modified_base 2060: mod_base = OTHER; note = N1-methylpseudouracil
  modified_base 2062: mod_base = OTHER; note = N1-methylpseudouracil
  modified_base 2074: mod_base = OTHER; note = N1-methylpseudouracil
  modified_base 2082: mod_base = OTHER; note = N1-methylpseudouracil
  modified_base 2083: mod_base = OTHER; note = N1-methylpseudouracil
  modified_base 2085: mod_base = OTHER; note = N1-methylpseudouracil
  modified_base 2089: mod_base = OTHER; note = N1-methylpseudouracil
  modified_base 2107: mod_base = OTHER; note = N1-methylpseudouracil
  modified_base 2112: mod_base = OTHER; note = N1-methylpseudouracil
  modified_base 2136: mod_base = OTHER; note = N1-methylpseudouracil
  modified_base 2137: mod_base = OTHER; note = N1-methylpseudouracil
  modified_base 2154: mod_base = OTHER; note = N1-methylpseudouracil
  modified_base 2155: mod_base = OTHER; note = N1-methylpseudouracil
  modified_base 2175: mod_base = OTHER; note = N1-methylpseudouracil
  modified_base 2179: mod_base = OTHER; note = N1-methylpseudouracil
  modified_base 2182: mod_base = OTHER; note = N1-methylpseudouracil
  modified_base 2191: mod_base = OTHER; note = N1-methylpseudouracil
  modified_base 2200: mod_base = OTHER; note = N1-methylpseudouracil
  modified_base 2208: mod_base = OTHER; note = N1-methylpseudouracil
  modified_base 2209: mod_base = OTHER; note = N1-methylpseudouracil
  modified_base 2215: mod_base = OTHER; note = N1-methylpseudouracil
  modified_base 2218: mod_base = OTHER; note = N1-methylpseudouracil
  modified_base 2231: mod_base = OTHER; note = N1-methylpseudouracil
  modified_base 2233: mod_base = OTHER; note = N1-methylpseudouracil
  modified_base 2239: mod_base = OTHER; note = N1-methylpseudouracil
  modified_base 2248: mod_base = OTHER; note = N1-methylpseudouracil
  modified_base 2272: mod_base = OTHER; note = N1-methylpseudouracil
  modified_base 2284: mod_base = OTHER; note = N1-methylpseudouracil
  modified_base 2286: mod_base = OTHER; note = N1-methylpseudouracil
  modified_base 2290: mod_base = OTHER; note = N1-methylpseudouracil
  modified_base 2293: mod_base = OTHER; note = N1-methylpseudouracil
  modified_base 2320: mod_base = OTHER; note = N1-methylpseudouracil
  modified_base 2323: mod_base = OTHER; note = N1-methylpseudouracil
  modified_base 2332: mod_base = OTHER; note = N1-methylpseudouracil
  modified_base 2334: mod_base = OTHER; note = N1-methylpseudouracil
  modified_base 2338: mod_base = OTHER; note = N1-methylpseudouracil
  modified_base 2341: mod_base = OTHER; note = N1-methylpseudouracil
  modified_base 2343: mod_base = OTHER; note = N1-methylpseudouracil
  modified_base 2348: mod_base = OTHER; note = N1-methylpseudouracil
  modified_base 2359: mod_base = OTHER; note = N1-methylpseudouracil
  modified_base 2383: mod_base = OTHER; note = N1-methylpseudouracil
  modified_base 2386: mod_base = OTHER; note = N1-methylpseudouracil
  modified_base 2392: mod_base = OTHER; note = N1-methylpseudouracil
  modified_base 2395: mod_base = OTHER; note = N1-methylpseudouracil
  modified_base 2407: mod_base = OTHER; note = N1-methylpseudouracil
  modified_base 2423: mod_base = OTHER; note = N1-methylpseudouracil
  modified_base 2425: mod_base = OTHER; note = N1-methylpseudouracil
  modified_base 2438: mod_base = OTHER; note = N1-methylpseudouracil
  modified_base 2458: mod_base = OTHER; note = N1-methylpseudouracil
  modified_base 2464: mod_base = OTHER; note = N1-methylpseudouracil
  modified_base 2468: mod_base = OTHER; note = N1-methylpseudouracil
  modified_base 2482: mod_base = OTHER; note = N1-methylpseudouracil
  modified_base 2491: mod_base = OTHER; note = N1-methylpseudouracil
  modified_base 2497: mod_base = OTHER; note = N1-methylpseudouracil
  modified_base 2499: mod_base = OTHER; note = N1-methylpseudouracil
  modified_base 2512: mod_base = OTHER; note = N1-methylpseudouracil
  modified_base 2530: mod_base = OTHER; note = N1-methylpseudouracil
  modified_base 2536: mod_base = OTHER; note = N1-methylpseudouracil
  modified_base 2548: mod_base = OTHER; note = N1-methylpseudouracil
  modified_base 2563: mod_base = OTHER; note = N1-methylpseudouracil
  modified_base 2571: mod_base = OTHER; note = N1-methylpseudouracil
  modified_base 2574: mod_base = OTHER; note = N1-methylpseudouracil
  modified_base 2575: mod_base = OTHER; note = N1-methylpseudouracil
  modified_base 2577: mod_base = OTHER; note = N1-methylpseudouracil
  modified_base 2578: mod_base = OTHER; note = N1-methylpseudouracil
  modified_base 2587: mod_base = OTHER; note = N1-methylpseudouracil
  modified_base 2592: mod_base = OTHER; note = N1-methylpseudouracil
  modified_base 2596: mod_base = OTHER; note = N1-methylpseudouracil
  modified_base 2605: mod_base = OTHER; note = N1-methylpseudouracil
  modified_base 2613: mod_base = OTHER; note = N1-methylpseudouracil
  modified_base 2622: mod_base = OTHER; note = N1-methylpseudouracil
  modified_base 2626: mod_base = OTHER; note = N1-methylpseudouracil
  modified_base 2631: mod_base = OTHER; note = N1-methylpseudouracil
  modified_base 2635: mod_base = OTHER; note = N1-methylpseudouracil
  modified_base 2641: mod_base = OTHER; note = N1-methylpseudouracil
  modified_base 2653: mod_base = OTHER; note = N1-methylpseudouracil
  modified_base 2656: mod_base = OTHER; note = N1-methylpseudouracil
  modified_base 2658: mod_base = OTHER; note = N1-methylpseudouracil
  modified_base 2659: mod_base = OTHER; note = N1-methylpseudouracil
  modified_base 2662: mod_base = OTHER; note = N1-methylpseudouracil
  modified_base 2665: mod_base = OTHER; note = N1-methylpseudouracil
  modified_base 2668: mod_base = OTHER; note = N1-methylpseudouracil
  modified_base 2670: mod_base = OTHER; note = N1-methylpseudouracil
  modified_base 2673: mod_base = OTHER; note = N1-methylpseudouracil
  modified_base 2677: mod_base = OTHER; note = N1-methylpseudouracil
  modified_base 2680: mod_base = OTHER; note = N1-methylpseudouracil
  modified_base 2683: mod_base = OTHER; note = N1-methylpseudouracil
  modified_base 2685: mod_base = OTHER; note = N1-methylpseudouracil
  modified_base 2686: mod_base = OTHER; note = N1-methylpseudouracil
  modified_base 2688: mod_base = OTHER; note = N1-methylpseudouracil
  modified_base 2689: mod_base = OTHER; note = N1-methylpseudouracil
  modified_base 2698: mod_base = OTHER; note = N1-methylpseudouracil
  modified_base 2706: mod_base = OTHER; note = N1-methylpseudouracil
  modified_base 2710: mod_base = OTHER; note = N1-methylpseudouracil
  modified_base 2713: mod_base = OTHER; note = N1-methylpseudouracil
  modified_base 2716: mod_base = OTHER; note = N1-methylpseudouracil
  modified_base 2719: mod_base = OTHER; note = N1-methylpseudouracil
  modified_base 2721: mod_base = OTHER; note = N1-methylpseudouracil
  modified_base 2725: mod_base = OTHER; note = N1-methylpseudouracil
  modified_base 2728: mod_base = OTHER; note = N1-methylpseudouracil
  modified_base 2735: mod_base = OTHER; note = N1-methylpseudouracil
  modified_base 2743: mod_base = OTHER; note = N1-methylpseudouracil
  modified_base 2760: mod_base = OTHER; note = N1-methylpseudouracil
  modified_base 2784: mod_base = OTHER; note = N1-methylpseudouracil
  modified_base 2791: mod_base = OTHER; note = N1-methylpseudouracil
  modified_base 2794: mod_base = OTHER; note = N1-methylpseudouracil
  modified_base 2797: mod_base = OTHER; note = N1-methylpseudouracil
  modified_base 2802: mod_base = OTHER; note = N1-methylpseudouracil
  modified_base 2814: mod_base = OTHER; note = N1-methylpseudouracil
  modified_base 2817: mod_base = OTHER; note = N1-methylpseudouracil
  modified_base 2821: mod_base = OTHER; note = N1-methylpseudouracil
  modified_base 2823: mod_base = OTHER; note = N1-methylpseudouracil
  modified_base 2824: mod_base = OTHER; note = N1-methylpseudouracil
  modified_base 2826: mod_base = OTHER; note = N1-methylpseudouracil
  modified_base 2830: mod_base = OTHER; note = N1-methylpseudouracil
  modified_base 2832: mod_base = OTHER; note = N1-methylpseudouracil
  modified_base 2836: mod_base = OTHER; note = N1-methylpseudouracil
  modified_base 2842: mod_base = OTHER; note = N1-methylpseudouracil
  modified_base 2854: mod_base = OTHER; note = N1-methylpseudouracil
  modified_base 2857: mod_base = OTHER; note = N1-methylpseudouracil
  modified_base 2863: mod_base = OTHER; note = N1-methylpseudouracil
  modified_base 2868: mod_base = OTHER; note = N1-methylpseudouracil
  modified_base 2869: mod_base = OTHER; note = N1-methylpseudouracil
  modified_base 2871: mod_base = OTHER; note = N1-methylpseudouracil
  modified_base 2872: mod_base = OTHER; note = N1-methylpseudouracil
  modified_base 2881: mod_base = OTHER; note = N1-methylpseudouracil
  modified_base 2885: mod_base = OTHER; note = N1-methylpseudouracil
  modified_base 2887: mod_base = OTHER; note = N1-methylpseudouracil
  modified_base 2890: mod_base = OTHER; note = N1-methylpseudouracil
  modified_base 2899: mod_base = OTHER; note = N1-methylpseudouracil
  modified_base 2902: mod_base = OTHER; note = N1-methylpseudouracil
  modified_base 2908: mod_base = OTHER; note = N1-methylpseudouracil
  modified_base 2917: mod_base = OTHER; note = N1-methylpseudouracil
  modified_base 2920: mod_base = OTHER; note = N1-methylpseudouracil
  modified_base 2932: mod_base = OTHER; note = N1-methylpseudouracil
  modified_base 2935: mod_base = OTHER; note = N1-methylpseudouracil
  modified_base 2944: mod_base = OTHER; note = N1-methylpseudouracil
  modified_base 2947: mod_base = OTHER; note = N1-methylpseudouracil
  modified_base 2954: mod_base = OTHER; note = N1-methylpseudouracil
  modified_base 2959: mod_base = OTHER; note = N1-methylpseudouracil
  modified_base 2961: mod_base = OTHER; note = N1-methylpseudouracil
  modified_base 2968: mod_base = OTHER; note = N1-methylpseudouracil
  modified_base 2977: mod_base = OTHER; note = N1-methylpseudouracil
  modified_base 2992: mod_base = OTHER; note = N1-methylpseudouracil
  modified_base 2995: mod_base = OTHER; note = N1-methylpseudouracil
  modified_base 3003: mod_base = OTHER; note = N1-methylpseudouracil
  modified_base 3004: mod_base = OTHER; note = N1-methylpseudouracil
  modified_base 3016: mod_base = OTHER; note = N1-methylpseudouracil
  modified_base 3022: mod_base = OTHER; note = N1-methylpseudouracil
  modified_base 3023: mod_base = OTHER; note = N1-methylpseudouracil
  modified_base 3025: mod_base = OTHER; note = N1-methylpseudouracil
  modified_base 3032: mod_base = OTHER; note = N1-methylpseudouracil
  modified_base 3034: mod_base = OTHER; note = N1-methylpseudouracil
  modified_base 3037: mod_base = OTHER; note = N1-methylpseudouracil
  modified_base 3043: mod_base = OTHER; note = N1-methylpseudouracil
  modified_base 3049: mod_base = OTHER; note = N1-methylpseudouracil
  modified_base 3051: mod_base = OTHER; note = N1-methylpseudouracil
  modified_base 3052: mod_base = OTHER; note = N1-methylpseudouracil
  modified_base 3057: mod_base = OTHER; note = N1-methylpseudouracil
  modified_base 3058: mod_base = OTHER; note = N1-methylpseudouracil
  modified_base 3061: mod_base = OTHER; note = N1-methylpseudouracil
  modified_base 3067: mod_base = OTHER; note = N1-methylpseudouracil
  modified_base 3070: mod_base = OTHER; note = N1-methylpseudouracil
  modified_base 3073: mod_base = OTHER; note = N1-methylpseudouracil
  modified_base 3076: mod_base = OTHER; note = N1-methylpseudouracil
  modified_base 3079: mod_base = OTHER; note = N1-methylpseudouracil
  modified_base 3082: mod_base = OTHER; note = N1-methylpseudouracil
  modified_base 3091: mod_base = OTHER; note = N1-methylpseudouracil
  modified_base 3097: mod_base = OTHER; note = N1-methylpseudouracil
  modified_base 3100: mod_base = OTHER; note = N1-methylpseudouracil
  modified_base 3106: mod_base = OTHER; note = N1-methylpseudouracil
  modified_base 3109: mod_base = OTHER; note = N1-methylpseudouracil
  modified_base 3117: mod_base = OTHER; note = N1-methylpseudouracil
  modified_base 3121: mod_base = OTHER; note = N1-methylpseudouracil
  modified_base 3123: mod_base = OTHER; note = N1-methylpseudouracil
  modified_base 3124: mod_base = OTHER; note = N1-methylpseudouracil
  modified_base 3127: mod_base = OTHER; note = N1-methylpseudouracil
  modified_base 3136: mod_base = OTHER; note = N1-methylpseudouracil
  modified_base 3142: mod_base = OTHER; note = N1-methylpseudouracil
  modified_base 3145: mod_base = OTHER; note = N1-methylpseudouracil
  modified_base 3148: mod_base = OTHER; note = N1-methylpseudouracil
  modified_base 3153: mod_base = OTHER; note = N1-methylpseudouracil
  modified_base 3154: mod_base = OTHER; note = N1-methylpseudouracil
  modified_base 3157: mod_base = OTHER; note = N1-methylpseudouracil
  modified_base 3160: mod_base = OTHER; note = N1-methylpseudouracil
  modified_base 3163: mod_base = OTHER; note = N1-methylpseudouracil
  modified_base 3171: mod_base = OTHER; note = N1-methylpseudouracil
  modified_base 3174: mod_base = OTHER; note = N1-methylpseudouracil
  modified_base 3175: mod_base = OTHER; note = N1-methylpseudouracil
  modified_base 3178: mod_base = OTHER; note = N1-methylpseudouracil
  modified_base 3186: mod_base = OTHER; note = N1-methylpseudouracil
  modified_base 3196: mod_base = OTHER; note = N1-methylpseudouracil
  modified_base 3205: mod_base = OTHER; note = N1-methylpseudouracil
  modified_base 3229: mod_base = OTHER; note = N1-methylpseudouracil
  modified_base 3231: mod_base = OTHER; note = N1-methylpseudouracil
  modified_base 3232: mod_base = OTHER; note = N1-methylpseudouracil
  modified_base 3241: mod_base = OTHER; note = N1-methylpseudouracil
  modified_base 3244: mod_base = OTHER; note = N1-methylpseudouracil
  modified_base 3248: mod_base = OTHER; note = N1-methylpseudouracil
  modified_base 3253: mod_base = OTHER; note = N1-methylpseudouracil
  modified_base 3262: mod_base = OTHER; note = N1-methylpseudouracil
  modified_base 3264: mod_base = OTHER; note = N1-methylpseudouracil
  modified_base 3271: mod_base = OTHER; note = N1-methylpseudouracil
  modified_base 3279: mod_base = OTHER; note = N1-methylpseudouracil
  modified_base 3280: mod_base = OTHER; note = N1-methylpseudouracil
  modified_base 3294: mod_base = OTHER; note = N1-methylpseudouracil
  modified_base 3297: mod_base = OTHER; note = N1-methylpseudouracil
  modified_base 3298: mod_base = OTHER; note = N1-methylpseudouracil
  modified_base 3307: mod_base = OTHER; note = N1-methylpseudouracil
  modified_base 3309: mod_base = OTHER; note = N1-methylpseudouracil
  modified_base 3310: mod_base = OTHER; note = N1-methylpseudouracil
  modified_base 3320: mod_base = OTHER; note = N1-methylpseudouracil
  modified_base 3322: mod_base = OTHER; note = N1-methylpseudouracil
  modified_base 3328: mod_base = OTHER; note = N1-methylpseudouracil
  modified_base 3342: mod_base = OTHER; note = N1-methylpseudouracil
  modified_base 3345: mod_base = OTHER; note = N1-methylpseudouracil
  modified_base 3346: mod_base = OTHER; note = N1-methylpseudouracil
  modified_base 3349: mod_base = OTHER; note = N1-methylpseudouracil
  modified_base 3351: mod_base = OTHER; note = N1-methylpseudouracil
  modified_base 3355: mod_base = OTHER; note = N1-methylpseudouracil
  modified_base 3364: mod_base = OTHER; note = N1-methylpseudouracil
  modified_base 3369: mod_base = OTHER; note = N1-methylpseudouracil
  modified_base 3372: mod_base = OTHER; note = N1-methylpseudouracil
  modified_base 3373: mod_base = OTHER; note = N1-methylpseudouracil
  modified_base 3379: mod_base = OTHER; note = N1-methylpseudouracil
  modified_base 3385: mod_base = OTHER; note = N1-methylpseudouracil
  modified_base 3391: mod_base = OTHER; note = N1-methylpseudouracil
  modified_base 3394: mod_base = OTHER; note = N1-methylpseudouracil
  modified_base 3396: mod_base = OTHER; note = N1-methylpseudouracil
  modified_base 3397: mod_base = OTHER; note = N1-methylpseudouracil
  modified_base 3400: mod_base = OTHER; note = N1-methylpseudouracil
  modified_base 3403: mod_base = OTHER; note = N1-methylpseudouracil
  modified_base 3405: mod_base = OTHER; note = N1-methylpseudouracil
  modified_base 3406: mod_base = OTHER; note = N1-methylpseudouracil
  modified_base 3408: mod_base = OTHER; note = N1-methylpseudouracil
  modified_base 3409: mod_base = OTHER; note = N1-methylpseudouracil
  modified_base 3412: mod_base = OTHER; note = N1-methylpseudouracil
  modified_base 3418: mod_base = OTHER; note = N1-methylpseudouracil
  modified_base 3423: mod_base = OTHER; note = N1-methylpseudouracil
  modified_base 3424: mod_base = OTHER; note = N1-methylpseudouracil
  modified_base 3427: mod_base = OTHER; note = N1-methylpseudouracil
  modified_base 3429: mod_base = OTHER; note = N1-methylpseudouracil
  modified_base 3433: mod_base = OTHER; note = N1-methylpseudouracil
  modified_base 3436: mod_base = OTHER; note = N1-methylpseudouracil
  modified_base 3463: mod_base = OTHER; note = N1-methylpseudouracil
  modified_base 3469: mod_base = OTHER; note = N1-methylpseudouracil
  modified_base 3472: mod_base = OTHER; note = N1-methylpseudouracil
  modified_base 3475: mod_base = OTHER; note = N1-methylpseudouracil
  modified_base 3481: mod_base = OTHER; note = N1-methylpseudouracil
  modified_base 3487: mod_base = OTHER; note = N1-methylpseudouracil
  modified_base 3491: mod_base = OTHER; note = N1-methylpseudouracil
  modified_base 3493: mod_base = OTHER; note = N1-methylpseudouracil
  modified_base 3496: mod_base = OTHER; note = N1-methylpseudouracil
  modified_base 3505: mod_base = OTHER; note = N1-methylpseudouracil
  modified_base 3510: mod_base = OTHER; note = N1-methylpseudouracil
  modified_base 3517: mod_base = OTHER; note = N1-methylpseudouracil
  modified_base 3529: mod_base = OTHER; note = N1-methylpseudouracil
  modified_base 3535: mod_base = OTHER; note = N1-methylpseudouracil
  modified_base 3544: mod_base = OTHER; note = N1-methylpseudouracil
  modified_base 3547: mod_base = OTHER; note = N1-methylpseudouracil
  modified_base 3552: mod_base = OTHER; note = N1-methylpseudouracil
  modified_base 3556: mod_base = OTHER; note = N1-methylpseudouracil
  modified_base 3558: mod_base = OTHER; note = N1-methylpseudouracil
  modified_base 3565: mod_base = OTHER; note = N1-methylpseudouracil
  modified_base 3567: mod_base = OTHER; note = N1-methylpseudouracil
  modified_base 3568: mod_base = OTHER; note = N1-methylpseudouracil
  modified_base 3573: mod_base = OTHER; note = N1-methylpseudouracil
  modified_base 3574: mod_base = OTHER; note = N1-methylpseudouracil
  modified_base 3577: mod_base = OTHER; note = N1-methylpseudouracil
  modified_base 3583: mod_base = OTHER; note = N1-methylpseudouracil
  modified_base 3621: mod_base = OTHER; note = N1-methylpseudouracil
  modified_base 3637: mod_base = OTHER; note = N1-methylpseudouracil
  modified_base 3646: mod_base = OTHER; note = N1-methylpseudouracil
  modified_base 3649: mod_base = OTHER; note = N1-methylpseudouracil
  modified_base 3652: mod_base = OTHER; note = N1-methylpseudouracil
  modified_base 3653: mod_base = OTHER; note = N1-methylpseudouracil
  modified_base 3655: mod_base = OTHER; note = N1-methylpseudouracil
  modified_base 3670: mod_base = OTHER; note = N1-methylpseudouracil
  modified_base 3685: mod_base = OTHER; note = N1-methylpseudouracil
  modified_base 3687: mod_base = OTHER; note = N1-methylpseudouracil
  modified_base 3692: mod_base = OTHER; note = N1-methylpseudouracil
  modified_base 3693: mod_base = OTHER; note = N1-methylpseudouracil
  modified_base 3706: mod_base = OTHER; note = N1-methylpseudouracil
  modified_base 3712: mod_base = OTHER; note = N1-methylpseudouracil
  modified_base 3721: mod_base = OTHER; note = N1-methylpseudouracil
  modified_base 3732: mod_base = OTHER; note = N1-methylpseudouracil
  modified_base 3754: mod_base = OTHER; note = N1-methylpseudouracil
  modified_base 3757: mod_base = OTHER; note = N1-methylpseudouracil
  modified_base 3766: mod_base = OTHER; note = N1-methylpseudouracil
  modified_base 3771: mod_base = OTHER; note = N1-methylpseudouracil
  modified_base 3772: mod_base = OTHER; note = N1-methylpseudouracil
  modified_base 3774: mod_base = OTHER; note = N1-methylpseudouracil
  modified_base 3778: mod_base = OTHER; note = N1-methylpseudouracil
  modified_base 3779: mod_base = OTHER; note = N1-methylpseudouracil
  modified_base 3785: mod_base = OTHER; note = N1-methylpseudouracil
  modified_base 3796: mod_base = OTHER; note = N1-methylpseudouracil
  modified_base 3802: mod_base = OTHER; note = N1-methylpseudouracil
  modified_base 3804: mod_base = OTHER; note = N1-methylpseudouracil
  modified_base 3805: mod_base = OTHER; note = N1-methylpseudouracil
  modified_base 3821: mod_base = OTHER; note = N1-methylpseudouracil
  modified_base 3835: mod_base = OTHER; note = N1-methylpseudouracil
  modified_base 3838: mod_base = OTHER; note = N1-methylpseudouracil
  modified_base 3840: mod_base = OTHER; note = N1-methylpseudouracil
  modified_base 3846: mod_base = OTHER; note = N1-methylpseudouracil
  modified_base 3847: mod_base = OTHER; note = N1-methylpseudouracil
  modified_base 3850: mod_base = OTHER; note = N1-methylpseudouracil
  modified_base 3856: mod_base = OTHER; note = N1-methylpseudouracil
  modified_base 3859: mod_base = OTHER; note = N1-methylpseudouracil
  modified_base 3877: mod_base = OTHER; note = N1-methylpseudouracil
  modified_base 3883: mod_base = OTHER; note = N1-methylpseudouracil
  modified_base 3892: mod_base = OTHER; note = N1-methylpseudouracil
  modified_base 3897: mod_base = OTHER; note = N1-methylpseudouracil
  modified_base 3907: mod_base = OTHER; note = N1-methylpseudouracil
  modified_base 3913: mod_base = OTHER; note = N1-methylpseudouracil
  modified_base 3921: mod_base = OTHER; note = N1-methylpseudouracil
  modified_base 3933: mod_base = OTHER; note = N1-methylpseudouracil
  modified_base 3934: mod_base = OTHER; note = N1-methylpseudouracil
  modified_base 3940: mod_base = OTHER; note = N1-methylpseudouracil
  modified_base 3943: mod_base = OTHER; note = N1-methylpseudouracil
  modified_base 3955: mod_base = OTHER; note = N1-methylpseudouracil
  modified_base 3957: mod_base = OTHER; note = N1-methylpseudouracil
  modified_base 3958: mod_base = OTHER; note = N1-methylpseudouracil
  modified_base 3959: mod_base = OTHER; note = N1-methylpseudouracil
  modified_base 3961: mod_base = OTHER; note = N1-methylpseudouracil
  modified_base 3962: mod_base = OTHER; note = N1-methylpseudouracil
  modified_base 3963: mod_base = OTHER; note = N1-methylpseudouracil
  modified_base 3964: mod_base = OTHER; note = N1-methylpseudouracil
  modified_base 3966: mod_base = OTHER; note = N1-methylpseudouracil
  modified_base 3968: mod_base = OTHER; note = N1-methylpseudouracil
  modified_base 3975: mod_base = OTHER; note = N1-methylpseudouracil
  modified_base 3976: mod_base = OTHER; note = N1-methylpseudouracil
  modified_base 3977: mod_base = OTHER; note = N1-methylpseudouracil
  modified_base 3988: mod_base = OTHER; note = N1-methylpseudouracil
  modified_base 3996: mod_base = OTHER; note = N1-methylpseudouracil
  modified_base 4005: mod_base = OTHER; note = N1-methylpseudouracil
  modified_base 4008: mod_base = OTHER; note = N1-methylpseudouracil
  modified_base 4021: mod_base = OTHER; note = N1-methylpseudouracil
  modified_base 4023: mod_base = OTHER; note = N1-methylpseudouracil
  modified_base 4030: mod_base = OTHER; note = N1-methylpseudouracil
  modified_base 4042: mod_base = OTHER; note = N1-methylpseudouracil
  modified_base 4048: mod_base = OTHER; note = N1-methylpseudouracil
  modified_base 4053: mod_base = OTHER; note = N1-methylpseudouracil
  modified_base 4057: mod_base = OTHER; note = N1-methylpseudouracil
  modified_base 4060: mod_base = OTHER; note = N1-methylpseudouracil
  modified_base 4068: mod_base = OTHER; note = N1-methylpseudouracil
  modified_base 4069: mod_base = OTHER; note = N1-methylpseudouracil
  modified_base 4081: mod_base = OTHER; note = N1-methylpseudouracil
  modified_base 4086: mod_base = OTHER; note = N1-methylpseudouracil
  modified_base 4087: mod_base = OTHER; note = N1-methylpseudouracil
  modified_base 4090: mod_base = OTHER; note = N1-methylpseudouracil
  modified_base 4093: mod_base = OTHER; note = N1-methylpseudouracil
  modified_base 4096: mod_base = OTHER; note = N1-methylpseudouracil
  modified_base 4107: mod_base = OTHER; note = N1-methylpseudouracil
  modified_base 4111: mod_base = OTHER; note = N1-methylpseudouracil
  modified_base 4114: mod_base = OTHER; note = N1-methylpseudouracil
  modified_base 4135: mod_base = OTHER; note = N1-methylpseudouracil
  modified_base 4138: mod_base = OTHER; note = N1-methylpseudouracil
  modified_base 4140: mod_base = OTHER; note = N1-methylpseudouracil
  modified_base 4144: mod_base = OTHER; note = N1-methylpseudouracil
  modified_base 4156: mod_base = OTHER; note = N1-methylpseudouracil
  modified_base 4159: mod_base = OTHER; note = N1-methylpseudouracil
  modified_base 4174: mod_base = OTHER; note = N1-methylpseudouracil
  modified_base 4177: mod_base = OTHER; note = N1-methylpseudouracil
  modified_base 4180: mod_base = OTHER; note = N1-methylpseudouracil
  modified_base 4183: mod_base = OTHER; note = N1-methylpseudouracil
  modified_base 4194: mod_base = OTHER; note = N1-methylpseudouracil
  modified_base 4204: mod_base = OTHER; note = N1-methylpseudouracil
  modified_base 4208: mod_base = OTHER; note = N1-methylpseudouracil
  modified_base 4213: mod_base = OTHER; note = N1-methylpseudouracil
  modified_base 4218: mod_base = OTHER; note = N1-methylpseudouracil
  modified_base 4225: mod_base = OTHER; note = N1-methylpseudouracil
  modified_base 4228: mod_base = OTHER; note = N1-methylpseudouracil
  modified_base 4240: mod_base = OTHER; note = N1-methylpseudouracil
  modified_base 4251: mod_base = OTHER; note = N1-methylpseudouracil
  modified_base 4252: mod_base = OTHER; note = N1-methylpseudouracil
  modified_base 4260: mod_base = OTHER; note = N1-methylpseudouracil
  modified_base 4267: mod_base = OTHER; note = N1-methylpseudouracil
  modified_base 4270: mod_base = OTHER; note = N1-methylpseudouracil
  modified_base 4273: mod_base = OTHER; note = N1-methylpseudouracil
  modified_base 4275: mod_base = OTHER; note = N1-methylpseudouracil
  modified_base 4288: mod_base = OTHER; note = N1-methylpseudouracil
  modified_base 4295: mod_base = OTHER; note = N1-methylpseudouracil
  modified_base 4297: mod_base = OTHER; note = N1-methylpseudouracil
  modified_base 4300: mod_base = OTHER; note = N1-methylpseudouracil
  modified_base 4305: mod_base = OTHER; note = N1-methylpseudouracil
  modified_base 4314: mod_base = OTHER; note = N1-methylpseudouracil
  modified_base 4315: mod_base = OTHER; note = N1-methylpseudouracil
  modified_base 4318: mod_base = OTHER; note = N1-methylpseudouracil
  modified_base 4321: mod_base = OTHER; note = N1-methylpseudouracil
  modified_base 4324: mod_base = OTHER; note = N1-methylpseudouracil
  modified_base 4339: mod_base = OTHER; note = N1-methylpseudouracil
  modified_base 4347: mod_base = OTHER; note = N1-methylpseudouracil
  modified_base 4353: mod_base = OTHER; note = N1-methylpseudouracil
  modified_base 4357: mod_base = OTHER; note = N1-methylpseudouracil
  modified_base 4366: mod_base = OTHER; note = N1-methylpseudouracil
  modified_base 4369: mod_base = OTHER; note = N1-methylpseudouracil
  modified_base 4384: mod_base = OTHER; note = N1-methylpseudouracil
  modified_base 4386: mod_base = OTHER; note = N1-methylpseudouracil
  modified_base 4387: mod_base = OTHER; note = N1-methylpseudouracil
  modified_base 4397: mod_base = OTHER; note = N1-methylpseudouracil
  modified_base 4399: mod_base = OTHER; note = N1-methylpseudouracil
  modified_base 4401: mod_base = OTHER; note = N1-methylpseudouracil
  modified_base 4403: mod_base = OTHER; note = N1-methylpseudouracil
  modified_base 4412: mod_base = OTHER; note = N1-methylpseudouracil
  modified_base 4417: mod_base = OTHER; note = N1-methylpseudouracil
  modified_base 4423: mod_base = OTHER; note = N1-methylpseudouracil
  modified_base 4425: mod_base = OTHER; note = N1-methylpseudouracil
  modified_base 4426: mod_base = OTHER; note = N1-methylpseudouracil
  modified_base 4430: mod_base = OTHER; note = N1-methylpseudouracil
  modified_base 4449: mod_base = OTHER; note = N1-methylpseudouracil
  modified_base 4455: mod_base = OTHER; note = N1-methylpseudouracil
  modified_base 4457: mod_base = OTHER; note = N1-methylpseudouracil
  modified_base 4468: mod_base = OTHER; note = N1-methylpseudouracil
  modified_base 4477: mod_base = OTHER; note = N1-methylpseudouracil
  modified_base 4501: mod_base = OTHER; note = N1-methylpseudouracil
  modified_base 4508: mod_base = OTHER; note = N1-methylpseudouracil
  modified_base 4516: mod_base = OTHER; note = N1-methylpseudouracil
  modified_base 4518: mod_base = OTHER; note = N1-methylpseudouracil
  modified_base 4522: mod_base = OTHER; note = N1-methylpseudouracil
  modified_base 4524: mod_base = OTHER; note = N1-methylpseudouracil
  modified_base 4529: mod_base = OTHER; note = N1-methylpseudouracil
  modified_base 4536: mod_base = OTHER; note = N1-methylpseudouracil
  modified_base 4539: mod_base = OTHER; note = N1-methylpseudouracil
  modified_base 4548: mod_base = OTHER; note = N1-methylpseudouracil
  modified_base 4550: mod_base = OTHER; note = N1-methylpseudouracil
  modified_base 4552: mod_base = OTHER; note = N1-methylpseudouracil
  modified_base 4557: mod_base = OTHER; note = N1-methylpseudouracil
  modified_base 4559: mod_base = OTHER; note = N1-methylpseudouracil
  modified_base 4560: mod_base = OTHER; note = N1-methylpseudouracil
  modified_base 4568: mod_base = OTHER; note = N1-methylpseudouracil
  modified_base 4578: mod_base = OTHER; note = N1-methylpseudouracil
  modified_base 4581: mod_base = OTHER; note = N1-methylpseudouracil
  modified_base 4582: mod_base = OTHER; note = N1-methylpseudouracil
  modified_base 4585: mod_base = OTHER; note = N1-methylpseudouracil
  modified_base 4587: mod_base = OTHER; note = N1-methylpseudouracil
  modified_base 4595: mod_base = OTHER; note = N1-methylpseudouracil
  modified_base 4596: mod_base = OTHER; note = N1-methylpseudouracil
  modified_base 4599: mod_base = OTHER; note = N1-methylpseudouracil
  modified_base 4607: mod_base = OTHER; note = N1-methylpseudouracil
  modified_base 4610: mod_base = OTHER; note = N1-methylpseudouracil
  modified_base 4612: mod_base = OTHER; note = N1-methylpseudouracil
  modified_base 4613: mod_base = OTHER; note = N1-methylpseudouracil
  modified_base 4614: mod_base = OTHER; note = N1-methylpseudouracil
  modified_base 4618: mod_base = OTHER; note = N1-methylpseudouracil
  modified_base 4623: mod_base = OTHER; note = N1-methylpseudouracil
  modified_base 4625: mod_base = OTHER; note = N1-methylpseudouracil
  modified_base 4629: mod_base = OTHER; note = N1-methylpseudouracil
ggggaaatcgcaaaatttgctcttcgcgttagatttcttttagttttctcgcaactagcaagctttttgttctcgccatgcagcggagccctctggagaaggccagcgtggtgagcaagctgttcttcagctggaccaggcccatcctgcgaaagggctacagacagaggctggagctgtccgacatctaccagattccatccgtggacagcgccgacaatctgagcgagaagctggagagggagtgggaccgcgagctggccagcaagaagaaccctaagctgatcaacgccctgcgccgctgcttcttctggaggttcatgttctacggcatcttcctgtacctgggcgaggtgaccaaggccgtccagcctctgctgctgggccgcatcatcgccagctacgatcccgacaacaaggaggaacgctccatcgccatctacctgggcatcggcctgtgtctgctgttcatcgtgcggaccctgctgctgcaccccgccatcttcggcctgcatcacatcggcatgcagatgaggatcgccatgttctccctgatctacaagaagaccctgaagctgtccagccgcgtgctggataagatcagcatcgggcagctggtgagcctgctgagcaacaacctgaacaagttcgacgaggggttggcgctggcccacttcgtgtggattgccccgctgcaggtggctctgctgatggggctgatctgggagctgctgcaggcctctgccttctgcgggctggggtttctgatcgtgctggccctgttccaagctggcctgggccgcatgatgatgaagtaccgcgatcagagggccggcaagatcagcgagcgcctggtgatcactagcgagatgatagagaacatccagagcgtgaaggcttactgttgggaggaggccatggagaagatgatcgagaacctgaggcagaccgagctgaagctgactagaaaggcagcctacgtgaggtatttcaactccagcgccttcttcttcagcggcttcttcgtggtgttcctgagcgtgctgccctacgccctgatcaagggcatcatcctgaggaagatcttcaccaccattagcttctgcatcgtgctgcgcatggccgtgaccaggcagttcccttgggccgtgcagacttggtacgacagcctgggagccatcaacaagatccaggactttctgcagaagcaggaatataagaccctggagtacaacctgaccaccaccgaggtggtgatggagaacgtgaccgccttctgggaggagggcttcggcgagctgttcgagaaggccaagcagaacaataacaaccgcaagaccagcaacggcgacgactccctcttcttcagcaactttagcctgctgggcacccctgtgctgaaggacatcaacttcaagatcgaaagaggccaactgctggccgtggccggatctaccggcgccggcaagaccagcctgctgatgatgatcatgggcgagctggagcccagcgagggcaagatcaagcacagcggccggatctccttctgctcccagttctcctggatcatgcccggcaccatcaaggagaacatcatcttcggcgtgagctacgacgagtacaggtaccggagcgtgatcaaggcctgccagctggaggaggacatctccaaatttgccgagaaggacaacattgtgctgggcgaaggcgggatcaccctgtccggtggccagcgtgcacgcatctccctggcccgggctgtgtacaaggacgccgacctgtacctgctggacagcccttttggctacctggacgtgctgaccgagaaggagatcttcgagtcctgcgtgtgtaagctgatggccaacaagaccagaatcctggtgaccagcaagatggagcatctgaagaaggccgacaagatcctgatcctgcacgaggggtccagctacttctacggcaccttcagcgagctgcagaacctgcagcccgacttcagctccaagctgatgggctgcgatagcttcgaccagttctccgccgagagaaggaactccattctgaccgagaccctgcaccgattctccctggagggagacgccccagtgagctggaccgagaccaagaagcagagcttcaagcagaccggcgagttcggagagaagcgcaagaactccatcctcaaccccatcaacagcatccggaagttcagcatcgtgcagaagacccctctgcagatgaacgggatcgaggaggacagcgacgagcccctggaacggcgactgtccctcgtgcccgacagcgagcagggcgaggccatcctgccccggatctccgtgatctccactgggcccaccctgcaagcccgacggcggcaaagcgtgctgaacctgatgacccacagcgtgaaccagggccagaatatccaccgcaagactacagccagcacccgcaaggtgagcctggctccccaggccaacctgaccgagctggacatctacagcaggaggctgagccaggagacaggcctggagatcagcgaggagatcaacgaggaggacctgaaggagtgcttcttcgacgacatggagtccatccccgccgtgaccacctggaacacctacctgagatacatcaccgtgcacaagagcctgatcttcgtgctgatctggtgcctggtgatcttcttggccgaggtagccgcctcactggtggtgctgtggctgctgggcaataccccactgcaggacaaggggaactccacccacagccggaacaacagctacgccgtgatcatcacctccaccagcagctactacgtgttctacatctacgtgggcgtggccgacacactgctggccatgggcttcttcagaggcctccctctggtgcacacactgatcaccgtgagcaagatcctgcaccacaagatgctgcacagcgtgctgcaggctcccatgtcaaccctgaacaccctgaaggccggcggcatcctgaacaggttcagcaaggacatcgccattctggacgatctgctgcccctgaccatcttcgacttcatccagctgctgctgatcgtgatcggggccatcgccgtggtggccgtgctgcagccctacatcttcgtggccacagtgcccgtgatcgtggccttcatcatgctgcgcgcctacttcctgcagacctcccagcagctgaagcagctggagagcgaaggccgcagccccatcttcacccacctggtgactagcctgaaggggctgtggaccctgcgcgccttcggcaggcagccctacttcgagaccctgttccacaaggctctgaacctgcacaccgccaactggttcctgtacctcagcaccctgcgctggttccagatgcggatcgagatgatcttcgtgatcttcttcatcgccgtgaccttcatctccatcctgaccaccggggaaggcgagggacgggtgggaatcatcctgaccctggccatgaatatcatgagcaccctgcagtgggccgtgaacagcagcatcgacgtggacagcctgatgcggtccgtgtcccgggtgttcaagttcatcgacatgcccaccgagggcaagcccaccaagagcaccaagccctacaagaacggccagctgagcaaggtgatgattatcgagaacagccacgtgaagaaggacgacatctggccttccggcggccagatgaccgtgaaggacctgaccgccaagtacaccgagggcggcaacgccatcctggagaacatcagcttctccattagccctggacagcgggtgggcctgttgggacggaccggcagtgggaagagcaccctgctgtccgccttcctgcggctgctgaacacggagggcgagatccagatcgacggggtgagctgggacagcatcaccctgcagcagtggcgaaaggccttcggcgtgatcccacagaaggtgtttattttctctggcacctttaggaagaacctggacccctacgagcagtggtccgaccaggagatctggaaggtggccgacgaggtgggcctgcggtcagtgatcgagcagttccccggcaagctggacttcgtgctggtggacggcggctgcgtgctgagccacggccacaagcagctgatgtgcctggcacgcagcgtgctgagcaaggccaagatcctgctgctggacgagccctccgcgcacctggatcccgtgacctaccagatcatcaggcggaccctgaagcaggccttcgccgactgcaccgtgatcctgtgcgagcacagaatcgaggctatgctggagtgccagcagttcctggtgatcgaggagaacaaggtgcggcagtacgactccatccagaagctgctgaacgagcgcagcctgttcagacaggctatctctcccagcgatcgcgtgaagctgttccctcacaggaacagcagcaagtgcaagtctaagccacagatcgccgccctgaaggaggagaccgaggaggaggtgcaggatacccgcctgtaagtctaagctggagcctcctgagagacctgtgtgaactattgagaagatcggaacagctccttactctgaggaagttggtacccccgtggtctttgaataaagtctgagtgggcggcaaaaaaaaaaaaaaaaaaaaaaaaaaaaaaaaaaaaaaaaaaaaaaaaaaaaaaaaaaaaaaaaaaaaaaaaaaaaaaaaaaaaaaaaaaaaaaaaaaaa

SEQ ID NO: 11 - DNA, 4763 bp, synthetic construct
  source 1..4763: mol_type = other DNA
  modified_base 1: mod_base = OTHER; note = 7-Methylguanosine with triphosphate linkage
  modified_base 2: mod_base = OTHER; note = 2'-O-methyl modified nucleotide
  modified_base 9: mod_base = OTHER; note = N1-methylpseudouracil
  modified_base 17: mod_base = OTHER; note = N1-methylpseudouracil
  modified_base 18: mod_base = OTHER; note = N1-methylpseudouracil
  modified_base 19: mod_base = OTHER; note = N1-methylpseudouracil
  modified_base 22: mod_base = OTHER; note = N1-methylpseudouracil
  modified_base 24: mod_base = OTHER; note = N1-methylpseudouracil
  modified_base 25: mod_base = OTHER; note = N1-methylpseudouracil
  modified_base 30: mod_base = OTHER; note = N1-methylpseudouracil
  modified_base 31: mod_base = OTHER; note = N1-methylpseudouracil
  modified_base 35: mod_base = OTHER; note = N1-methylpseudouracil
  modified_base 36: mod_base = OTHER; note = N1-methylpseudouracil
  modified_base 37: mod_base = OTHER; note = N1-methylpseudouracil
  modified_base 39: mod_base = OTHER; note = N1-methylpseudouracil
  modified_base 40: mod_base = OTHER; note = N1-methylpseudouracil
  modified_base 41: mod_base = OTHER; note = N1-methylpseudouracil
  modified_base 42: mod_base = OTHER; note = N1-methylpseudouracil
  modified_base 45: mod_base = OTHER; note = N1-methylpseudouracil
  modified_base 46: mod_base = OTHER; note = N1-methylpseudouracil
  modified_base 47: mod_base = OTHER; note = N1-methylpseudouracil
  modified_base 48: mod_base = OTHER; note = N1-methylpseudouracil
  modified_base 50: mod_base = OTHER; note = N1-methylpseudouracil
  modified_base 57: mod_base = OTHER; note = N1-methylpseudouracil
  modified_base 65: mod_base = OTHER; note = N1-methylpseudouracil
  modified_base 66: mod_base = OTHER; note = N1-methylpseudouracil
  modified_base 67: mod_base = OTHER; note = N1-methylpseudouracil
  modified_base 68: mod_base = OTHER; note = N1-methylpseudouracil
  modified_base 69: mod_base = OTHER; note = N1-methylpseudouracil
  modified_base 71: mod_base = OTHER; note = N1-methylpseudouracil
  modified_base 72: mod_base = OTHER; note = N1-methylpseudouracil
  modified_base 74: mod_base = OTHER; note = N1-methylpseudouracil
  modified_base 80: mod_base = OTHER; note = N1-methylpseudouracil
  modified_base 93: mod_base = OTHER; note = N1-methylpseudouracil
  modified_base 95: mod_base = OTHER; note = N1-methylpseudouracil
  modified_base 110: mod_base = OTHER; note = N1-methylpseudouracil
  modified_base 113: mod_base = OTHER; note = N1-methylpseudouracil
  modified_base 122: mod_base = OTHER; note = N1-methylpseudouracil
  modified_base 124: mod_base = OTHER; note = N1-methylpseudouracil
  modified_base 125: mod_base = OTHER; note = N1-methylpseudouracil
  modified_base 127: mod_base = OTHER; note = N1-methylpseudouracil
  modified_base 128: mod_base = OTHER; note = N1-methylpseudouracil
  modified_base 133: mod_base = OTHER; note = N1-methylpseudouracil
  modified_base 146: mod_base = OTHER; note = N1-methylpseudouracil
  modified_base 149: mod_base = OTHER; note = N1-methylpseudouracil
  modified_base 160: mod_base = OTHER; note = N1-methylpseudouracil
  modified_base 173: mod_base = OTHER; note = N1-methylpseudouracil
  modified_base 179: mod_base = OTHER; note = N1-methylpseudouracil
  modified_base 181: mod_base = OTHER; note = N1-methylpseudouracil
  modified_base 188: mod_base = OTHER; note = N1-methylpseudouracil
  modified_base 190: mod_base = OTHER; note = N1-methylpseudouracil
  modified_base 197: mod_base = OTHER; note = N1-methylpseudouracil
  modified_base 198: mod_base = OTHER; note = N1-methylpseudouracil
  modified_base 202: mod_base = OTHER; note = N1-methylpseudouracil
  modified_base 206: mod_base = OTHER; note = N1-methylpseudouracil
  modified_base 222: mod_base = OTHER; note = N1-methylpseudouracil
  modified_base 224: mod_base = OTHER; note = N1-methylpseudouracil
  modified_base 236: mod_base = OTHER; note = N1-methylpseudouracil
  modified_base 247: mod_base = OTHER; note = N1-methylpseudouracil
  modified_base 260: mod_base = OTHER; note = N1-methylpseudouracil
  modified_base 279: mod_base = OTHER; note = N1-methylpseudouracil
  modified_base 284: mod_base = OTHER; note = N1-methylpseudouracil
  modified_base 287: mod_base = OTHER; note = N1-methylpseudouracil
  modified_base 296: mod_base = OTHER; note = N1-methylpseudouracil
  modified_base 304: mod_base = OTHER; note = N1-methylpseudouracil
  modified_base 307: mod_base = OTHER; note = N1-methylpseudouracil
  modified_base 308: mod_base = OTHER; note = N1-methylpseudouracil
  modified_base 310: mod_base = OTHER; note = N1-methylpseudouracil
  modified_base 311: mod_base = OTHER; note = N1-methylpseudouracil
  modified_base 313: mod_base = OTHER; note = N1-methylpseudouracil
  modified_base 319: mod_base = OTHER; note = N1-methylpseudouracil
  modified_base 320: mod_base = OTHER; note = N1-methylpseudouracil
  modified_base 323: mod_base = OTHER; note = N1-methylpseudouracil
  modified_base 325: mod_base = OTHER; note = N1-methylpseudouracil
  modified_base 326: mod_base = OTHER; note = N1-methylpseudouracil
  modified_base 328: mod_base = OTHER; note = N1-methylpseudouracil
  modified_base 335: mod_base = OTHER; note = N1-methylpseudouracil
  modified_base 337: mod_base = OTHER; note = N1-methylpseudouracil
  modified_base 338: mod_base = OTHER; note = N1-methylpseudouracil
  modified_base 341: mod_base = OTHER; note = N1-methylpseudouracil
  modified_base 343: mod_base = OTHER; note = N1-methylpseudouracil
  modified_base 347: mod_base = OTHER; note = N1-methylpseudouracil
  modified_base 356: mod_base = OTHER; note = N1-methylpseudouracil
  modified_base 368: mod_base = OTHER; note = N1-methylpseudouracil
  modified_base 375: mod_base = OTHER; note = N1-methylpseudouracil
  modified_base 377: mod_base = OTHER; note = N1-methylpseudouracil
  modified_base 380: mod_base = OTHER; note = N1-methylpseudouracil
  modified_base 383: mod_base = OTHER; note = N1-methylpseudouracil
  modified_base 392: mod_base = OTHER; note = N1-methylpseudouracil
  modified_base 395: mod_base = OTHER; note = N1-methylpseudouracil
  modified_base 403: mod_base = OTHER; note = N1-methylpseudouracil
  modified_base 408: mod_base = OTHER; note = N1-methylpseudouracil
  modified_base 430: mod_base = OTHER; note = N1-methylpseudouracil
  modified_base 434: mod_base = OTHER; note = N1-methylpseudouracil
  modified_base 440: mod_base = OTHER; note = N1-methylpseudouracil
  modified_base 442: mod_base = OTHER; note = N1-methylpseudouracil
  modified_base 446: mod_base = OTHER; note = N1-methylpseudouracil
  modified_base 452: mod_base = OTHER; note = N1-methylpseudouracil
  modified_base 458: mod_base = OTHER; note = N1-methylpseudouracil
  modified_base 460: mod_base = OTHER; note = N1-methylpseudouracil
  modified_base 462: mod_base = OTHER; note = N1-methylpseudouracil
  modified_base 464: mod_base = OTHER; note = N1-methylpseudouracil
  modified_base 467: mod_base = OTHER; note = N1-methylpseudouracil
  modified_base 469: mod_base = OTHER; note = N1-methylpseudouracil
  modified_base 470: mod_base = OTHER; note = N1-methylpseudouracil
  modified_base 473: mod_base = OTHER; note = N1-methylpseudouracil
  modified_base 476: mod_base = OTHER; note = N1-methylpseudouracil
  modified_base 485: mod_base = OTHER; note = N1-methylpseudouracil
  modified_base 488: mod_base = OTHER; note = N1-methylpseudouracil
  modified_base 491: mod_base = OTHER; note = N1-methylpseudouracil
  modified_base 503: mod_base = OTHER; note = N1-methylpseudouracil
  modified_base 505: mod_base = OTHER; note = N1-methylpseudouracil
  modified_base 506: mod_base = OTHER; note = N1-methylpseudouracil
  modified_base 512: mod_base = OTHER; note = N1-methylpseudouracil
  modified_base 516: mod_base = OTHER; note = N1-methylpseudouracil
  modified_base 521: mod_base = OTHER; note = N1-methylpseudouracil
  modified_base 527: mod_base = OTHER; note = N1-methylpseudouracil
  modified_base 533: mod_base = OTHER; note = N1-methylpseudouracil
  modified_base 539: mod_base = OTHER; note = N1-methylpseudouracil
  modified_base 545: mod_base = OTHER; note = N1-methylpseudouracil
  modified_base 547: mod_base = OTHER; note = N1-methylpseudouracil
  modified_base 548: mod_base = OTHER; note = N1-methylpseudouracil
  modified_base 550: mod_base = OTHER; note = N1-methylpseudouracil
  modified_base 554: mod_base = OTHER; note = N1-methylpseudouracil
  modified_base 557: mod_base = OTHER; note = N1-methylpseudouracil
  modified_base 559: mod_base = OTHER; note = N1-methylpseudouracil
  modified_base 572: mod_base = OTHER; note = N1-methylpseudouracil
  modified_base 578: mod_base = OTHER; note = N1-methylpseudouracil
  modified_base 580: mod_base = OTHER; note = N1-methylpseudouracil
  modified_base 590: mod_base = OTHER; note = N1-methylpseudouracil
  modified_base 593: mod_base = OTHER; note = N1-methylpseudouracil
  modified_base 597: mod_base = OTHER; note = N1-methylpseudouracil
  modified_base 602: mod_base = OTHER; note = N1-methylpseudouracil
  modified_base 608: mod_base = OTHER; note = N1-methylpseudouracil
  modified_base 617: mod_base = OTHER; note = N1-methylpseudouracil
  modified_base 620: mod_base = OTHER; note = N1-methylpseudouracil
  modified_base 626: mod_base = OTHER; note = N1-methylpseudouracil
  modified_base 629: mod_base = OTHER; note = N1-methylpseudouracil
  modified_base 641: mod_base = OTHER; note = N1-methylpseudouracil
  modified_base 649: mod_base = OTHER; note = N1-methylpseudouracil
  modified_base 650: mod_base = OTHER; note = N1-methylpseudouracil
  modified_base 661: mod_base = OTHER; note = N1-methylpseudouracil
  modified_base 662: mod_base = OTHER; note = N1-methylpseudouracil
  modified_base 668: mod_base = OTHER; note = N1-methylpseudouracil
  modified_base 676: mod_base = OTHER; note = N1-methylpseudouracil
  modified_base 677: mod_base = OTHER; note = N1-methylpseudouracil
  modified_base 680: mod_base = OTHER; note = N1-methylpseudouracil
  modified_base 682: mod_base = OTHER; note = N1-methylpseudouracil
  modified_base 686: mod_base = OTHER; note = N1-methylpseudouracil
  modified_base 687: mod_base = OTHER; note = N1-methylpseudouracil
  modified_base 695: mod_base = OTHER; note = N1-methylpseudouracil
  modified_base 701: mod_base = OTHER; note = N1-methylpseudouracil
  modified_base 705: mod_base = OTHER; note = N1-methylpseudouracil
  modified_base 707: mod_base = OTHER; note = N1-methylpseudouracil
  modified_base 710: mod_base = OTHER; note = N1-methylpseudouracil
  modified_base 713: mod_base = OTHER; note = N1-methylpseudouracil
  modified_base 719: mod_base = OTHER; note = N1-methylpseudouracil
  modified_base 722: mod_base = OTHER; note = N1-methylpseudouracil
  modified_base 724: mod_base = OTHER; note = N1-methylpseudouracil
  modified_base 731: mod_base = OTHER; note = N1-methylpseudouracil
  modified_base 734: mod_base = OTHER; note = N1-methylpseudouracil
  modified_base 742: mod_base = OTHER; note = N1-methylpseudouracil
  modified_base 744: mod_base = OTHER; note = N1-methylpseudouracil
  modified_base 748: mod_base = OTHER; note = N1-methylpseudouracil
  modified_base 749: mod_base = OTHER; note = N1-methylpseudouracil
  modified_base 751: mod_base = OTHER; note = N1-methylpseudouracil
  modified_base 758: mod_base = OTHER; note = N1-methylpseudouracil
  modified_base 763: mod_base = OTHER; note = N1-methylpseudouracil
  modified_base 764: mod_base = OTHER; note = N1-methylpseudouracil
  modified_base 765: mod_base = OTHER; note = N1-methylpseudouracil
  modified_base 767: mod_base = OTHER; note = N1-methylpseudouracil
  modified_base 770: mod_base = OTHER; note = N1-methylpseudouracil
  modified_base 773: mod_base = OTHER; note = N1-methylpseudouracil
  modified_base 776: mod_base = OTHER; note = N1-methylpseudouracil
  modified_base 782: mod_base = OTHER; note = N1-methylpseudouracil
  modified_base 784: mod_base = OTHER; note = N1-methylpseudouracil
  modified_base 785: mod_base = OTHER; note = N1-methylpseudouracil
  modified_base 792: mod_base = OTHER; note = N1-methylpseudouracil
  modified_base 797: mod_base = OTHER; note = N1-methylpseudouracil
  modified_base 806: mod_base = OTHER; note = N1-methylpseudouracil
  modified_base 809: mod_base = OTHER; note = N1-methylpseudouracil
  modified_base 812: mod_base = OTHER; note = N1-methylpseudouracil
  modified_base 817: mod_base = OTHER; note = N1-methylpseudouracil
  modified_base 825: mod_base = OTHER; note = N1-methylpseudouracil
  modified_base 842: mod_base = OTHER; note = N1-methylpseudouracil
  modified_base 854: mod_base = OTHER; note = N1-methylpseudouracil
  modified_base 857: mod_base = OTHER; note = N1-methylpseudouracil
  modified_base 860: mod_base = OTHER; note = N1-methylpseudouracil
  modified_base 864: mod_base = OTHER; note = N1-methylpseudouracil
  modified_base 872: mod_base = OTHER; note = N1-methylpseudouracil
  modified_base 875: mod_base = OTHER; note = N1-methylpseudouracil
  modified_base 884: mod_base = OTHER; note = N1-methylpseudouracil
  modified_base 893: mod_base = OTHER; note = N1-methylpseudouracil
  modified_base 900: mod_base = OTHER; note = N1-methylpseudouracil
  modified_base 901: mod_base = OTHER; note = N1-methylpseudouracil
  modified_base 904: mod_base = OTHER; note = N1-methylpseudouracil
  modified_base 906: mod_base = OTHER; note = N1-methylpseudouracil
  modified_base 907: mod_base = OTHER; note = N1-methylpseudouracil
  modified_base 920: mod_base = OTHER; note = N1-methylpseudouracil
  modified_base 929: mod_base = OTHER; note = N1-methylpseudouracil
  modified_base 932: mod_base = OTHER; note = N1-methylpseudouracil
  modified_base 941: mod_base = OTHER; note = N1-methylpseudouracil
  modified_base 956: mod_base = OTHER; note = N1-methylpseudouracil
  modified_base 962: mod_base = OTHER; note = N1-methylpseudouracil
  modified_base 966: mod_base = OTHER; note = N1-methylpseudouracil
  modified_base 979: mod_base = OTHER; note = N1-methylpseudouracil
  modified_base 983: mod_base = OTHER; note = N1-methylpseudouracil
  modified_base 988: mod_base = OTHER; note = N1-methylpseudouracil
  modified_base 990: mod_base = OTHER; note = N1-methylpseudouracil
  modified_base 991: mod_base = OTHER; note = N1-methylpseudouracil
  modified_base 992: mod_base = OTHER; note = N1-methylpseudouracil
  modified_base 997: mod_base = OTHER; note = N1-methylpseudouracil
  modified_base 1006: mod_base = OTHER; note = N1-methylpseudouracil
  modified_base 1007: mod_base = OTHER; note = N1-methylpseudouracil
  modified_base 1009: mod_base = OTHER; note = N1-methylpseudouracil
  modified_base 1010: mod_base = OTHER; note = N1-methylpseudouracil
  modified_base 1012: mod_base = OTHER; note = N1-methylpseudouracil
  modified_base 1013: mod_base = OTHER; note = N1-methylpseudouracil
  modified_base 1021: mod_base = OTHER; note = N1-methylpseudouracil
  modified_base 1022: mod_base = OTHER; note = N1-methylpseudouracil
  modified_base 1024: mod_base = OTHER; note = N1-methylpseudouracil
  modified_base 1025: mod_base = OTHER; note = N1-methylpseudouracil
  modified_base 1028: mod_base = OTHER; note = N1-methylpseudouracil
  modified_base 1031: mod_base = OTHER; note = N1-methylpseudouracil
  modified_base 1033: mod_base = OTHER; note = N1-methylpseudouracil
  modified_base 1034: mod_base = OTHER; note = N1-methylpseudouracil
  modified_base 1037: mod_base = OTHER; note = N1-methylpseudouracil
  modified_base 1043: mod_base = OTHER; note = N1-methylpseudouracil
  modified_base 1046: mod_base = OTHER; note = N1-methylpseudouracil
  modified_base 1051: mod_base = OTHER; note = N1-methylpseudouracil
  modified_base 1058: mod_base = OTHER; note = N1-methylpseudouracil
  modified_base 1061: mod_base = OTHER; note = N1-methylpseudouracil
  modified_base 1070: mod_base = OTHER; note = N1-methylpseudouracil
  modified_base 1073: mod_base = OTHER; note = N1-methylpseudouracil
  modified_base 1076: mod_base = OTHER; note = N1-methylpseudouracil
  modified_base 1085: mod_base = OTHER; note = N1-methylpseudouracil
  modified_base 1087: mod_base = OTHER; note = N1-methylpseudouracil
  modified_base 1088: mod_base = OTHER; note = N1-methylpseudouracil
  modified_base 1097: mod_base = OTHER; note = N1-methylpseudouracil
  modified_base 1098: mod_base = OTHER; note = N1-methylpseudouracil
  modified_base 1102: mod_base = OTHER; note = N1-methylpseudouracil
  modified_base 1103: mod_base = OTHER; note = N1-methylpseudouracil
  modified_base 1105: mod_base = OTHER; note = N1-methylpseudouracil
  modified_base 1109: mod_base = OTHER; note = N1-methylpseudouracil
  modified_base 1112: mod_base = OTHER; note = N1-methylpseudouracil
  modified_base 1115: mod_base = OTHER; note = N1-methylpseudouracil
  modified_base 1121: mod_base = OTHER; note = N1-methylpseudouracil
  modified_base 1127: mod_base = OTHER; note = N1-methylpseudouracil
  modified_base 1138: mod_base = OTHER; note = N1-methylpseudouracil
  modified_base 1139: mod_base = OTHER; note = N1-methylpseudouracil
  modified_base 1143: mod_base = OTHER; note = N1-methylpseudouracil
  modified_base 1144: mod_base = OTHER; note = N1-methylpseudouracil
  modified_base 1151: mod_base = OTHER; note = N1-methylpseudouracil
  modified_base 1158: mod_base = OTHER; note = N1-methylpseudouracil
  modified_base 1159: mod_base = OTHER; note = N1-methylpseudouracil
  modified_base 1162: mod_base = OTHER; note = N1-methylpseudouracil
  modified_base 1172: mod_base = OTHER; note = N1-methylpseudouracil
  modified_base 1181: mod_base = OTHER; note = N1-methylpseudouracil
  modified_base 1190: mod_base = OTHER; note = N1-methylpseudouracil
  modified_base 1198: mod_base = OTHER; note = N1-methylpseudouracil
  modified_base 1199: mod_base = OTHER; note = N1-methylpseudouracil
  modified_base 1200: mod_base = OTHER; note = N1-methylpseudouracil
  modified_base 1202: mod_base = OTHER; note = N1-methylpseudouracil
  modified_base 1216: mod_base = OTHER; note = N1-methylpseudouracil
  modified_base 1218: mod_base = OTHER; note = N1-methylpseudouracil
  modified_base 1226: mod_base = OTHER; note = N1-methylpseudouracil
  modified_base 1231: mod_base = OTHER; note = N1-methylpseudouracil
  modified_base 1238: mod_base = OTHER; note = N1-methylpseudouracil
  modified_base 1253: mod_base = OTHER; note = N1-methylpseudouracil
  modified_base 1256: mod_base = OTHER; note = N1-methylpseudouracil
  modified_base 1259: mod_base = OTHER; note = N1-methylpseudouracil
  modified_base 1268: mod_base = OTHER; note = N1-methylpseudouracil
  modified_base 1276: mod_base = OTHER; note = N1-methylpseudouracil
  modified_base 1277: mod_base = OTHER; note = N1-methylpseudouracil
  modified_base 1279: mod_base = OTHER; note = N1-methylpseudouracil
  modified_base 1291: mod_base = OTHER; note = N1-methylpseudouracil
  modified_base 1292: mod_base = OTHER; note = N1-methylpseudouracil
  modified_base 1301: mod_base = OTHER; note = N1-methylpseudouracil
  modified_base 1303: mod_base = OTHER; note = N1-methylpseudouracil
  modified_base 1304: mod_base = OTHER; note = N1-methylpseudouracil
  modified_base 1326: mod_base = OTHER; note = N1-methylpseudouracil
  modified_base 1357: mod_base = OTHER; note = N1-methylpseudouracil
  modified_base 1361: mod_base = OTHER; note = N1-methylpseudouracil
  modified_base 1363: mod_base = OTHER; note = N1-methylpseudouracil
  modified_base 1364: mod_base = OTHER; note = N1-methylpseudouracil
  modified_base 1366: mod_base = OTHER; note = N1-methylpseudouracil
  modified_base 1367: mod_base = OTHER; note = N1-methylpseudouracil
  modified_base 1375: mod_base = OTHER; note = N1-methylpseudouracil
  modified_base 1376: mod_base = OTHER; note = N1-methylpseudouracil
  modified_base 1377: mod_base = OTHER; note = N1-methylpseudouracil
  modified_base 1382: mod_base = OTHER; note = N1-methylpseudouracil
  modified_base 1385: mod_base = OTHER; note = N1-methylpseudouracil
  modified_base 1395: mod_base = OTHER; note = N1-methylpseudouracil
  modified_base 1397: mod_base = OTHER; note = N1-methylpseudouracil
  modified_base 1400: mod_base = OTHER; note = N1-methylpseudouracil
  modified_base 1409: mod_base = OTHER; note = N1-methylpseudouracil
  modified_base 1414: mod_base = OTHER; note = N1-methylpseudouracil
  modified_base 1415: mod_base = OTHER; note = N1-methylpseudouracil
  modified_base 1421: mod_base = OTHER; note = N1-methylpseudouracil
  modified_base 1436: mod_base = OTHER; note = N1-methylpseudouracil
  modified_base 1439: mod_base = OTHER; note = N1-methylpseudouracil
  modified_base 1445: mod_base = OTHER; note = N1-methylpseudouracil
  modified_base 1453: mod_base = OTHER; note = N1-methylpseudouracil
  modified_base 1455: mod_base = OTHER; note = N1-methylpseudouracil
  modified_base 1478: mod_base = OTHER; note = N1-methylpseudouracil
  modified_base 1481: mod_base = OTHER; note = N1-methylpseudouracil
  modified_base 1484: mod_base = OTHER; note = N1-methylpseudouracil
  modified_base 1487: mod_base = OTHER; note = N1-methylpseudouracil
  modified_base 1490: mod_base = OTHER; note = N1-methylpseudouracil
  modified_base 1493: mod_base = OTHER; note = N1-methylpseudouracil
  modified_base 1502: mod_base = OTHER; note = N1-methylpseudouracil
  modified_base 1523: mod_base = OTHER; note = N1-methylpseudouracil
  modified_base 1541: mod_base = OTHER; note = N1-methylpseudouracil
  modified_base 1543: mod_base = OTHER; note = N1-methylpseudouracil
  modified_base 1546: mod_base = OTHER; note = N1-methylpseudouracil
  modified_base 1547: mod_base = OTHER; note = N1-methylpseudouracil
  modified_base 1549: mod_base = OTHER; note = N1-methylpseudouracil
  modified_base 1552: mod_base = OTHER; note = N1-methylpseudouracil
  modified_base 1558: mod_base = OTHER; note = N1-methylpseudouracil
  modified_base 1559: mod_base = OTHER; note = N1-methylpseudouracil
  modified_base 1561: mod_base = OTHER; note = N1-methylpseudouracil
  modified_base 1564: mod_base = OTHER; note = N1-methylpseudouracil
  modified_base 1568: mod_base = OTHER; note = N1-methylpseudouracil
  modified_base 1571: mod_base = OTHER; note = N1-methylpseudouracil
  modified_base 1583: mod_base = OTHER; note = N1-methylpseudouracil
  modified_base 1595: mod_base = OTHER; note = N1-methylpseudouracil
  modified_base 1598: mod_base = OTHER; note = N1-methylpseudouracil
  modified_base 1600: mod_base = OTHER; note = N1-methylpseudouracil
  modified_base 1601: mod_base = OTHER; note = N1-methylpseudouracil
  modified_base 1607: mod_base = OTHER; note = N1-methylpseudouracil
  modified_base 1612: mod_base = OTHER; note = N1-methylpseudouracil
  modified_base 1621: mod_base = OTHER; note = N1-methylpseudouracil
  modified_base 1627: mod_base = OTHER; note = N1-methylpseudouracil
  modified_base 1637: mod_base = OTHER; note = N1-methylpseudouracil
  modified_base 1640: mod_base = OTHER; note = N1-methylpseudouracil
  modified_base 1648: mod_base = OTHER; note = N1-methylpseudouracil
  modified_base 1655: mod_base = OTHER; note = N1-methylpseudouracil
  modified_base 1667: mod_base = OTHER; note = N1-methylpseudouracil
  modified_base 1669: mod_base = OTHER; note = N1-methylpseudouracil
  modified_base 1675: mod_base = OTHER; note = N1-methylpseudouracil
  modified_base 1676: mod_base = OTHER; note = N1-methylpseudouracil
  modified_base 1677: mod_base = OTHER; note = N1-methylpseudouracil
  modified_base 1694: mod_base = OTHER; note = N1-methylpseudouracil
  modified_base 1695: mod_base = OTHER; note = N1-methylpseudouracil
  modified_base 1697: mod_base = OTHER; note = N1-methylpseudouracil
  modified_base 1700: mod_base = OTHER; note = N1-methylpseudouracil
  modified_base 1715: mod_base = OTHER; note = N1-methylpseudouracil
  modified_base 1721: mod_base = OTHER; note = N1-methylpseudouracil
  modified_base 1723: mod_base = OTHER; note = N1-methylpseudouracil
  modified_base 1728: mod_base = OTHER; note = N1-methylpseudouracil
  modified_base 1737: mod_base = OTHER; note = N1-methylpseudouracil
  modified_base 1745: mod_base = OTHER; note = N1-methylpseudouracil
  modified_base 1747: mod_base = OTHER; note = N1-methylpseudouracil
  modified_base 1751: mod_base = OTHER; note = N1-methylpseudouracil
  modified_base 1761: mod_base = OTHER; note = N1-methylpseudouracil
  modified_base 1763: mod_base = OTHER; note = N1-methylpseudouracil
  modified_base 1765: mod_base = OTHER; note = N1-methylpseudouracil
  modified_base 1781: mod_base = OTHER; note = N1-methylpseudouracil
  modified_base 1783: mod_base = OTHER; note = N1-methylpseudouracil
  modified_base 1787: mod_base = OTHER; note = N1-methylpseudouracil
  modified_base 1790: mod_base = OTHER; note = N1-methylpseudouracil
  modified_base 1800: mod_base = OTHER; note = N1-methylpseudouracil
  modified_base 1801: mod_base = OTHER; note = N1-methylpseudouracil
  modified_base 1802: mod_base = OTHER; note = N1-methylpseudouracil
  modified_base 1803: mod_base = OTHER; note = N1-methylpseudouracil
  modified_base 1807: mod_base = OTHER; note = N1-methylpseudouracil
  modified_base 1811: mod_base = OTHER; note = N1-methylpseudouracil
  modified_base 1817: mod_base = OTHER; note = N1-methylpseudouracil
  modified_base 1820: mod_base = OTHER; note = N1-methylpseudouracil
  modified_base 1835: mod_base = OTHER; note = N1-methylpseudouracil
  modified_base 1837: mod_base = OTHER; note = N1-methylpseudouracil
  modified_base 1838: mod_base = OTHER; note = N1-methylpseudouracil
  modified_base 1843: mod_base = OTHER; note = N1-methylpseudouracil
  modified_base 1846: mod_base = OTHER; note = N1-methylpseudouracil
  modified_base 1850: mod_base = OTHER; note = N1-methylpseudouracil
  modified_base 1852: mod_base = OTHER; note = N1-methylpseudouracil
  modified_base 1854: mod_base = OTHER; note = N1-methylpseudouracil
  modified_base 1859: mod_base = OTHER; note = N1-methylpseudouracil
  modified_base 1862: mod_base = OTHER; note = N1-methylpseudouracil
  modified_base 1880: mod_base = OTHER; note = N1-methylpseudouracil
  modified_base 1883: mod_base = OTHER; note = N1-methylpseudouracil
  modified_base 1886: mod_base = OTHER; note = N1-methylpseudouracil
  modified_base 1898: mod_base = OTHER; note = N1-methylpseudouracil
  modified_base 1905: mod_base = OTHER; note = N1-methylpseudouracil
  modified_base 1907: mod_base = OTHER; note = N1-methylpseudouracil
  modified_base 1925: mod_base = OTHER; note = N1-methylpseudouracil
  modified_base 1928: mod_base = OTHER; note = N1-methylpseudouracil
  modified_base 1931: mod_base = OTHER; note = N1-methylpseudouracil
  modified_base 1934: mod_base = OTHER; note = N1-methylpseudouracil
  modified_base 1945: mod_base = OTHER; note = N1-methylpseudouracil
  modified_base 1951: mod_base = OTHER; note = N1-methylpseudouracil
  modified_base 1954: mod_base = OTHER; note = N1-methylpseudouracil
  modified_base 1955: mod_base = OTHER; note = N1-methylpseudouracil
  modified_base 1957: mod_base = OTHER; note = N1-methylpseudouracil
  modified_base 1966: mod_base = OTHER; note = N1-methylpseudouracil
  modified_base 1967: mod_base = OTHER; note = N1-methylpseudouracil
  modified_base 1976: mod_base = OTHER; note = N1-methylpseudouracil
  modified_base 1985: mod_base = OTHER; note = N1-methylpseudouracil
  modified_base 1996: mod_base = OTHER; note = N1-methylpseudouracil
  modified_base 1997: mod_base = OTHER; note = N1-methylpseudouracil
  modified_base 2002: mod_base = OTHER; note = N1-methylpseudouracil
  modified_base 2009: mod_base = OTHER; note = N1-methylpseudouracil
  modified_base 2012: mod_base = OTHER; note = N1-methylpseudouracil
  modified_base 2017: mod_base = OTHER; note = N1-methylpseudouracil
  modified_base 2022: mod_base = OTHER; note = N1-methylpseudouracil
  modified_base 2026: mod_base = OTHER; note = N1-methylpseudouracil
  modified_base 2027: mod_base = OTHER; note = N1-methylpseudouracil
  modified_base 2035: mod_base = OTHER; note = N1-methylpseudouracil
  modified_base 2036: mod_base = OTHER; note = N1-methylpseudouracil
  modified_base 2038: mod_base = OTHER; note = N1-methylpseudouracil
  modified_base 2056: mod_base = OTHER; note = N1-methylpseudouracil
  modified_base 2060: mod_base = OTHER; note = N1-methylpseudouracil
  modified_base 2061: mod_base = OTHER; note = N1-methylpseudouracil
  modified_base 2063: mod_base = OTHER; note = N1-methylpseudouracil
  modified_base 2075: mod_base = OTHER; note = N1-methylpseudouracil
  modified_base 2083: mod_base = OTHER; note = N1-methylpseudouracil
  modified_base 2084: mod_base = OTHER; note = N1-methylpseudouracil
  modified_base 2086: mod_base = OTHER; note = N1-methylpseudouracil
  modified_base 2090: mod_base = OTHER; note = N1-methylpseudouracil
  modified_base 2108: mod_base = OTHER; note = N1-methylpseudouracil
  modified_base 2113: mod_base = OTHER; note = N1-methylpseudouracil
  modified_base 2137: mod_base = OTHER; note = N1-methylpseudouracil
  modified_base 2138: mod_base = OTHER; note = N1-methylpseudouracil
  modified_base 2155: mod_base = OTHER; note = N1-methylpseudouracil
  modified_base 2156: mod_base = OTHER; note = N1-methylpseudouracil
  modified_base 2176: mod_base = OTHER; note = N1-methylpseudouracil
  modified_base 2180: mod_base = OTHER; note = N1-methylpseudouracil
  modified_base 2183: mod_base = OTHER; note = N1-methylpseudouracil
  modified_base 2192: mod_base = OTHER; note = N1-methylpseudouracil
  modified_base 2201: mod_base = OTHER; note = N1-methylpseudouracil
  modified_base 2209: mod_base = OTHER; note = N1-methylpseudouracil
  modified_base 2210: mod_base = OTHER; note = N1-methylpseudouracil
  modified_base 2216: mod_base = OTHER; note = N1-methylpseudouracil
  modified_base 2219: mod_base = OTHER; note = N1-methylpseudouracil
  modified_base 2232: mod_base = OTHER; note = N1-methylpseudouracil
  modified_base 2234: mod_base = OTHER; note = N1-methylpseudouracil
  modified_base 2240: mod_base = OTHER; note = N1-methylpseudouracil
  modified_base 2249: mod_base = OTHER; note = N1-methylpseudouracil
  modified_base 2273: mod_base = OTHER; note = N1-methylpseudouracil
  modified_base 2285: mod_base = OTHER; note = N1-methylpseudouracil
  modified_base 2287: mod_base = OTHER; note = N1-methylpseudouracil
  modified_base 2291: mod_base = OTHER; note = N1-methylpseudouracil
  modified_base 2294: mod_base = OTHER; note = N1-methylpseudouracil
  modified_base 2321: mod_base = OTHER; note = N1-methylpseudouracil
  modified_base 2324: mod_base = OTHER; note = N1-methylpseudouracil
  modified_base 2333: mod_base = OTHER; note = N1-methylpseudouracil
  modified_base 2335: mod_base = OTHER; note = N1-methylpseudouracil
  modified_base 2339: mod_base = OTHER; note = N1-methylpseudouracil
  modified_base 2342: mod_base = OTHER; note = N1-methylpseudouracil
  modified_base 2344: mod_base = OTHER; note = N1-methylpseudouracil
  modified_base 2349: mod_base = OTHER; note = N1-methylpseudouracil
  modified_base 2360: mod_base = OTHER; note = N1-methylpseudouracil
  modified_base 2384: mod_base = OTHER; note = N1-methylpseudouracil
  modified_base 2387: mod_base = OTHER; note = N1-methylpseudouracil
  modified_base 2393: mod_base = OTHER; note = N1-methylpseudouracil
  modified_base 2396: mod_base = OTHER; note = N1-methylpseudouracil
  modified_base 2408: mod_base = OTHER; note = N1-methylpseudouracil
  modified_base 2424: mod_base = OTHER; note = N1-methylpseudouracil
  modified_base 2426: mod_base = OTHER; note = N1-methylpseudouracil
  modified_base 2439: mod_base = OTHER; note = N1-methylpseudouracil
  modified_base 2459: mod_base = OTHER; note = N1-methylpseudouracil
  modified_base 2465: mod_base = OTHER; note = N1-methylpseudouracil
  modified_base 2469: mod_base = OTHER; note = N1-methylpseudouracil
  modified_base 2483: mod_base = OTHER; note = N1-methylpseudouracil
  modified_base 2492: mod_base = OTHER; note = N1-methylpseudouracil
  modified_base 2498: mod_base = OTHER; note = N1-methylpseudouracil
  modified_base 2500: mod_base = OTHER; note = N1-methylpseudouracil
  modified_base 2513: mod_base = OTHER; note = N1-methylpseudouracil
  modified_base 2531: mod_base = OTHER; note = N1-methylpseudouracil
  modified_base 2537: mod_base = OTHER; note = N1-methylpseudouracil
  modified_base 2549: mod_base = OTHER; note = N1-methylpseudouracil
  modified_base 2564: mod_base = OTHER; note = N1-methylpseudouracil
  modified_base 2572: mod_base = OTHER; note = N1-methylpseudouracil
  modified_base 2575: mod_base = OTHER; note = N1-methylpseudouracil
  modified_base 2576: mod_base = OTHER; note = N1-methylpseudouracil
  modified_base 2578: mod_base = OTHER; note = N1-methylpseudouracil
  modified_base 2579: mod_base = OTHER; note = N1-methylpseudouracil
  modified_base 2588: mod_base = OTHER; note = N1-methylpseudouracil
  modified_base 2593: mod_base = OTHER; note = N1-methylpseudouracil
  modified_base 2597: mod_base = OTHER; note = N1-methylpseudouracil
  modified_base 2606: mod_base = OTHER; note = N1-methylpseudouracil
  modified_base 2614: mod_base = OTHER; note = N1-methylpseudouracil
  modified_base 2623: mod_base = OTHER; note = N1-methylpseudouracil
  modified_base 2627: mod_base = OTHER; note = N1-methylpseudouracil
  modified_base 2632: mod_base = OTHER; note = N1-methylpseudouracil
  modified_base 2636: mod_base = OTHER; note = N1-methylpseudouracil
  modified_base 2642: mod_base = OTHER; note = N1-methylpseudouracil
  modified_base 2654: mod_base = OTHER; note = N1-methylpseudouracil
  modified_base 2657: mod_base = OTHER; note = N1-methylpseudouracil
  modified_base 2659: mod_base = OTHER; note = N1-methylpseudouracil
  modified_base 2660: mod_base = OTHER; note = N1-methylpseudouracil
  modified_base 2663: mod_base = OTHER; note = N1-methylpseudouracil
  modified_base 2666: mod_base = OTHER; note = N1-methylpseudouracil
  modified_base 2669: mod_base = OTHER; note = N1-methylpseudouracil
  modified_base 2671: mod_base = OTHER; note = N1-methylpseudouracil
  modified_base 2674: mod_base = OTHER; note = N1-methylpseudouracil
  modified_base 2678: mod_base = OTHER; note = N1-methylpseudouracil
  modified_base 2681: mod_base = OTHER; note = N1-methylpseudouracil
  modified_base 2684: mod_base = OTHER; note = N1-methylpseudouracil
  modified_base 2686: mod_base = OTHER; note = N1-methylpseudouracil
  modified_base 2687: mod_base = OTHER; note = N1-methylpseudouracil
  modified_base 2689: mod_base = OTHER; note = N1-methylpseudouracil
  modified_base 2690: mod_base = OTHER; note = N1-methylpseudouracil
  modified_base 2699: mod_base = OTHER; note = N1-methylpseudouracil
  modified_base 2707: mod_base = OTHER; note = N1-methylpseudouracil
  modified_base 2711: mod_base = OTHER; note = N1-methylpseudouracil
  modified_base 2714: mod_base = OTHER; note = N1-methylpseudouracil
  modified_base 2717: mod_base = OTHER; note = N1-methylpseudouracil
  modified_base 2720: mod_base = OTHER; note = N1-methylpseudouracil
  modified_base 2722: mod_base = OTHER; note = N1-methylpseudouracil
  modified_base 2726: mod_base = OTHER; note = N1-methylpseudouracil
  modified_base 2729: mod_base = OTHER; note = N1-methylpseudouracil
  modified_base 2736: mod_base = OTHER; note = N1-methylpseudouracil
  modified_base 2744: mod_base = OTHER; note = N1-methylpseudouracil
  modified_base 2761: mod_base = OTHER; note = N1-methylpseudouracil
  modified_base 2785: mod_base = OTHER; note = N1-methylpseudouracil
  modified_base 2792: mod_base = OTHER; note = N1-methylpseudouracil
  modified_base 2795: mod_base = OTHER; note = N1-methylpseudouracil
  modified_base 2798: mod_base = OTHER; note = N1-methylpseudouracil
  modified_base 2803: mod_base = OTHER; note = N1-methylpseudouracil
  modified_base 2815: mod_base = OTHER; note = N1-methylpseudouracil
  modified_base 2818: mod_base = OTHER; note = N1-methylpseudouracil
  modified_base 2822: mod_base = OTHER; note = N1-methylpseudouracil
  modified_base 2824: mod_base = OTHER; note = N1-methylpseudouracil
  modified_base 2825: mod_base = OTHER; note = N1-methylpseudouracil
  modified_base 2827: mod_base = OTHER; note = N1-methylpseudouracil
  modified_base 2831: mod_base = OTHER; note = N1-methylpseudouracil
  modified_base 2833: mod_base = OTHER; note = N1-methylpseudouracil
  modified_base 2837: mod_base = OTHER; note = N1-methylpseudouracil
  modified_base 2843: mod_base = OTHER; note = N1-methylpseudouracil
  modified_base 2855: mod_base = OTHER; note = N1-methylpseudouracil
  modified_base 2858: mod_base = OTHER; note = N1-methylpseudouracil
  modified_base 2864: mod_base = OTHER; note = N1-methylpseudouracil
  modified_base 2869: mod_base = OTHER; note = N1-methylpseudouracil
  modified_base 2870: mod_base = OTHER; note = N1-methylpseudouracil
  modified_base 2872: mod_base = OTHER; note = N1-methylpseudouracil
  modified_base 2873: mod_base = OTHER; note = N1-methylpseudouracil
  modified_base 2882: mod_base = OTHER; note = N1-methylpseudouracil
  modified_base 2886: mod_base = OTHER; note = N1-methylpseudouracil
  modified_base 2888: mod_base = OTHER; note = N1-methylpseudouracil
  modified_base 2891: mod_base = OTHER; note = N1-methylpseudouracil
  modified_base 2900: mod_base = OTHER; note = N1-methylpseudouracil
  modified_base 2903: mod_base = OTHER; note = N1-methylpseudouracil
  modified_base 2909: mod_base = OTHER; note = N1-methylpseudouracil
  modified_base 2918: mod_base = OTHER; note = N1-methylpseudouracil
  modified_base 2921: mod_base = OTHER; note = N1-methylpseudouracil
  modified_base 2933: mod_base = OTHER; note = N1-methylpseudouracil
  modified_base 2936: mod_base = OTHER; note = N1-methylpseudouracil
  modified_base 2945: mod_base = OTHER; note = N1-methylpseudouracil
  modified_base 2948: mod_base = OTHER; note = N1-methylpseudouracil
  modified_base 2955: mod_base = OTHER; note = N1-methylpseudouracil
  modified_base 2960: mod_base = OTHER; note = N1-methylpseudouracil
  modified_base 2962: mod_base = OTHER; note = N1-methylpseudouracil
  modified_base 2969: mod_base = OTHER; note = N1-methylpseudouracil
  modified_base 2978: mod_base = OTHER; note = N1-methylpseudouracil
  modified_base 2993: mod_base = OTHER; note = N1-methylpseudouracil
  modified_base 2996: mod_base = OTHER; note = N1-methylpseudouracil
  modified_base 3004: mod_base = OTHER; note = N1-methylpseudouracil
  modified_base 3005: mod_base = OTHER; note = N1-methylpseudouracil
  modified_base 3017: mod_base = OTHER; note = N1-methylpseudouracil
  modified_base 3023: mod_base = OTHER; note = N1-methylpseudouracil
  modified_base 3024: mod_base = OTHER; note = N1-methylpseudouracil
  modified_base 3026: mod_base = OTHER; note = N1-methylpseudouracil
  modified_base 3033: mod_base = OTHER; note = N1-methylpseudouracil
  modified_base 3035: mod_base = OTHER; note = N1-methylpseudouracil
  modified_base 3038: mod_base = OTHER; note = N1-methylpseudouracil
  modified_base 3044: mod_base = OTHER; note = N1-methylpseudouracil
  modified_base 3050: mod_base = OTHER; note = N1-methylpseudouracil
  modified_base 3052: mod_base = OTHER; note = N1-methylpseudouracil
  modified_base 3053: mod_base = OTHER; note = N1-methylpseudouracil
  modified_base 3058: mod_base = OTHER; note = N1-methylpseudouracil
  modified_base 3059: mod_base = OTHER; note = N1-methylpseudouracil
  modified_base 3062: mod_base = OTHER; note = N1-methylpseudouracil
  modified_base 3068: mod_base = OTHER; note = N1-methylpseudouracil
  modified_base 3071: mod_base = OTHER; note = N1-methylpseudouracil
  modified_base 3074: mod_base = OTHER; note = N1-methylpseudouracil
  modified_base 3077: mod_base = OTHER; note = N1-methylpseudouracil
  modified_base 3080: mod_base = OTHER; note = N1-methylpseudouracil
  modified_base 3083: mod_base = OTHER; note = N1-methylpseudouracil
  modified_base 3092: mod_base = OTHER; note = N1-methylpseudouracil
  modified_base 3098: mod_base = OTHER; note = N1-methylpseudouracil
  modified_base 3101: mod_base = OTHER; note = N1-methylpseudouracil
  modified_base 3107: mod_base = OTHER; note = N1-methylpseudouracil
  modified_base 3110: mod_base = OTHER; note = N1-methylpseudouracil
  modified_base 3118: mod_base = OTHER; note = N1-methylpseudouracil
  modified_base 3122: mod_base = OTHER; note = N1-methylpseudouracil
  modified_base 3124: mod_base = OTHER; note = N1-methylpseudouracil
  modified_base 3125: mod_base = OTHER; note = N1-methylpseudouracil
  modified_base 3128: mod_base = OTHER; note = N1-methylpseudouracil
  modified_base 3137: mod_base = OTHER; note = N1-methylpseudouracil
  modified_base 3143: mod_base = OTHER; note = N1-methylpseudouracil
  modified_base 3146: mod_base = OTHER; note = N1-methylpseudouracil
  modified_base 3149: mod_base = OTHER; note = N1-methylpseudouracil
  modified_base 3154: mod_base = OTHER; note = N1-methylpseudouracil
  modified_base 3155: mod_base = OTHER; note = N1-methylpseudouracil
  modified_base 3158: mod_base = OTHER; note = N1-methylpseudouracil
  modified_base 3161: mod_base = OTHER; note = N1-methylpseudouracil
  modified_base 3164: mod_base = OTHER; note = N1-methylpseudouracil
  modified_base 3172: mod_base = OTHER; note = N1-methylpseudouracil
  modified_base 3175: mod_base = OTHER; note = N1-methylpseudouracil
  modified_base 3176: mod_base = OTHER; note = N1-methylpseudouracil
  modified_base 3179: mod_base = OTHER; note = N1-methylpseudouracil
  modified_base 3187: mod_base = OTHER; note = N1-methylpseudouracil
  modified_base 3197: mod_base = OTHER; note = N1-methylpseudouracil
  modified_base 3206: mod_base = OTHER; note = N1-methylpseudouracil
  modified_base 3230: mod_base = OTHER; note = N1-methylpseudouracil
  modified_base 3232: mod_base = OTHER; note = N1-methylpseudouracil
  modified_base 3233: mod_base = OTHER; note = N1-methylpseudouracil
  modified_base 3242: mod_base = OTHER; note = N1-methylpseudouracil
  modified_base 3245: mod_base = OTHER; note = N1-methylpseudouracil
  modified_base 3249: mod_base = OTHER; note = N1-methylpseudouracil
  modified_base 3254: mod_base = OTHER; note = N1-methylpseudouracil
  modified_base 3263: mod_base = OTHER; note = N1-methylpseudouracil
  modified_base 3265: mod_base = OTHER; note = N1-methylpseudouracil
  modified_base 3272: mod_base = OTHER; note = N1-methylpseudouracil
  modified_base 3280: mod_base = OTHER; note = N1-methylpseudouracil
  modified_base 3281: mod_base = OTHER; note = N1-methylpseudouracil
  modified_base 3295: mod_base = OTHER; note = N1-methylpseudouracil
  modified_base 3298: mod_base = OTHER; note = N1-methylpseudouracil
  modified_base 3299: mod_base = OTHER; note = N1-methylpseudouracil
  modified_base 3308: mod_base = OTHER; note = N1-methylpseudouracil
  modified_base 3310: mod_base = OTHER; note = N1-methylpseudouracil
  modified_base 3311: mod_base = OTHER; note = N1-methylpseudouracil
  modified_base 3321: mod_base = OTHER; note = N1-methylpseudouracil
  modified_base 3323: mod_base = OTHER; note = N1-methylpseudouracil
  modified_base 3329: mod_base = OTHER; note = N1-methylpseudouracil
  modified_base 3343: mod_base = OTHER; note = N1-methylpseudouracil
  modified_base 3346: mod_base = OTHER; note = N1-methylpseudouracil
  modified_base 3347: mod_base = OTHER; note = N1-methylpseudouracil
  modified_base 3350: mod_base = OTHER; note = N1-methylpseudouracil
  modified_base 3352: mod_base = OTHER; note = N1-methylpseudouracil
  modified_base 3356: mod_base = OTHER; note = N1-methylpseudouracil
  modified_base 3365: mod_base = OTHER; note = N1-methylpseudouracil
  modified_base 3370: mod_base = OTHER; note = N1-methylpseudouracil
  modified_base 3373: mod_base = OTHER; note = N1-methylpseudouracil
  modified_base 3374: mod_base = OTHER; note = N1-methylpseudouracil
  modified_base 3380: mod_base = OTHER; note = N1-methylpseudouracil
  modified_base 3386: mod_base = OTHER; note = N1-methylpseudouracil
  modified_base 3392: mod_base = OTHER; note = N1-methylpseudouracil
  modified_base 3395: mod_base = OTHER; note = N1-methylpseudouracil
  modified_base 3397: mod_base = OTHER; note = N1-methylpseudouracil
  modified_base 3398: mod_base = OTHER; note = N1-methylpseudouracil
  modified_base 3401: mod_base = OTHER; note = N1-methylpseudouracil
  modified_base 3404: mod_base = OTHER; note = N1-methylpseudouracil
  modified_base 3406: mod_base = OTHER; note = N1-methylpseudouracil
  modified_base 3407: mod_base = OTHER; note = N1-methylpseudouracil
  modified_base 3409: mod_base = OTHER; note = N1-methylpseudouracil
  modified_base 3410: mod_base = OTHER; note = N1-methylpseudouracil
  modified_base 3413: mod_base = OTHER; note = N1-methylpseudouracil
  modified_base 3419: mod_base = OTHER; note = N1-methylpseudouracil
  modified_base 3424: mod_base = OTHER; note = N1-methylpseudouracil
  modified_base 3425: mod_base = OTHER; note = N1-methylpseudouracil
  modified_base 3428: mod_base = OTHER; note = N1-methylpseudouracil
  modified_base 3430: mod_base = OTHER; note = N1-methylpseudouracil
  modified_base 3434: mod_base = OTHER; note = N1-methylpseudouracil
  modified_base 3437: mod_base = OTHER; note = N1-methylpseudouracil
  modified_base 3464: mod_base = OTHER; note = N1-methylpseudouracil
  modified_base 3470: mod_base = OTHER; note = N1-methylpseudouracil
  modified_base 3473: mod_base = OTHER; note = N1-methylpseudouracil
  modified_base 3476: mod_base = OTHER; note = N1-methylpseudouracil
  modified_base 3482: mod_base = OTHER; note = N1-methylpseudouracil
  modified_base 3488: mod_base = OTHER; note = N1-methylpseudouracil
  modified_base 3492: mod_base = OTHER; note = N1-methylpseudouracil
  modified_base 3494: mod_base = OTHER; note = N1-methylpseudouracil
  modified_base 3497: mod_base = OTHER; note = N1-methylpseudouracil
  modified_base 3506: mod_base = OTHER; note = N1-methylpseudouracil
  modified_base 3511: mod_base = OTHER; note = N1-methylpseudouracil
  modified_base 3518: mod_base = OTHER; note = N1-methylpseudouracil
  modified_base 3530: mod_base = OTHER; note = N1-methylpseudouracil
  modified_base 3536: mod_base = OTHER; note = N1-methylpseudouracil
  modified_base 3545: mod_base = OTHER; note = N1-methylpseudouracil
  modified_base 3548: mod_base = OTHER; note = N1-methylpseudouracil
  modified_base 3553: mod_base = OTHER; note = N1-methylpseudouracil
  modified_base 3557: mod_base = OTHER; note = N1-methylpseudouracil
  modified_base 3559: mod_base = OTHER; note = N1-methylpseudouracil
  modified_base 3566: mod_base = OTHER; note = N1-methylpseudouracil
  modified_base 3568: mod_base = OTHER; note = N1-methylpseudouracil
  modified_base 3569: mod_base = OTHER; note = N1-methylpseudouracil
  modified_base 3574: mod_base = OTHER; note = N1-methylpseudouracil
  modified_base 3575: mod_base = OTHER; note = N1-methylpseudouracil
  modified_base 3578: mod_base = OTHER; note = N1-methylpseudouracil
  modified_base 3584: mod_base = OTHER; note = N1-methylpseudouracil
  modified_base 3622: mod_base = OTHER; note = N1-methylpseudouracil
  modified_base 3638: mod_base = OTHER; note = N1-methylpseudouracil
  modified_base 3647: mod_base = OTHER; note = N1-methylpseudouracil
  modified_base 3650: mod_base = OTHER; note = N1-methylpseudouracil
  modified_base 3653: mod_base = OTHER; note = N1-methylpseudouracil
  modified_base 3654: mod_base = OTHER; note = N1-methylpseudouracil
  modified_base 3656: mod_base = OTHER; note = N1-methylpseudouracil
  modified_base 3671: mod_base = OTHER; note = N1-methylpseudouracil
  modified_base 3686: mod_base = OTHER; note = N1-methylpseudouracil
  modified_base 3688: mod_base = OTHER; note = N1-methylpseudouracil
  modified_base 3693: mod_base = OTHER; note = N1-methylpseudouracil
  modified_base 3694: mod_base = OTHER; note = N1-methylpseudouracil
  modified_base 3707: mod_base = OTHER; note = N1-methylpseudouracil
  modified_base 3713: mod_base = OTHER; note = N1-methylpseudouracil
  modified_base 3722: mod_base = OTHER; note = N1-methylpseudouracil
  modified_base 3733: mod_base = OTHER; note = N1-methylpseudouracil
  modified_base 3755: mod_base = OTHER; note = N1-methylpseudouracil
  modified_base 3758: mod_base = OTHER; note = N1-methylpseudouracil
  modified_base 3767: mod_base = OTHER; note = N1-methylpseudouracil
  modified_base 3772: mod_base = OTHER; note = N1-methylpseudouracil
  modified_base 3773: mod_base = OTHER; note = N1-methylpseudouracil
  modified_base 3775: mod_base = OTHER; note = N1-methylpseudouracil
  modified_base 3779: mod_base = OTHER; note = N1-methylpseudouracil
  modified_base 3780: mod_base = OTHER; note = N1-methylpseudouracil
  modified_base 3786: mod_base = OTHER; note = N1-methylpseudouracil
  modified_base 3797: mod_base = OTHER; note = N1-methylpseudouracil
  modified_base 3803: mod_base = OTHER; note = N1-methylpseudouracil
  modified_base 3805: mod_base = OTHER; note = N1-methylpseudouracil
  modified_base 3806: mod_base = OTHER; note = N1-methylpseudouracil
  modified_base 3822: mod_base = OTHER; note = N1-methylpseudouracil
  modified_base 3836: mod_base = OTHER; note = N1-methylpseudouracil
  modified_base 3839: mod_base = OTHER; note = N1-methylpseudouracil
  modified_base 3841: mod_base = OTHER; note = N1-methylpseudouracil
  modified_base 3847: mod_base = OTHER; note = N1-methylpseudouracil
  modified_base 3848: mod_base = OTHER; note = N1-methylpseudouracil
  modified_base 3851: mod_base = OTHER; note = N1-methylpseudouracil
  modified_base 3857: mod_base = OTHER; note = N1-methylpseudouracil
  modified_base 3860: mod_base = OTHER; note = N1-methylpseudouracil
  modified_base 3878: mod_base = OTHER; note = N1-methylpseudouracil
  modified_base 3884: mod_base = OTHER; note = N1-methylpseudouracil
  modified_base 3893: mod_base = OTHER; note = N1-methylpseudouracil
  modified_base 3898: mod_base = OTHER; note = N1-methylpseudouracil
  modified_base 3908: mod_base = OTHER; note = N1-methylpseudouracil
  modified_base 3914: mod_base = OTHER; note = N1-methylpseudouracil
  modified_base 3922: mod_base = OTHER; note = N1-methylpseudouracil
  modified_base 3934: mod_base = OTHER; note = N1-methylpseudouracil
  modified_base 3935: mod_base = OTHER; note = N1-methylpseudouracil
  modified_base 3941: mod_base = OTHER; note = N1-methylpseudouracil
  modified_base 3944: mod_base = OTHER; note = N1-methylpseudouracil
  modified_base 3956: mod_base = OTHER; note = N1-methylpseudouracil
  modified_base 3958: mod_base = OTHER; note = N1-methylpseudouracil
  modified_base 3959: mod_base = OTHER; note = N1-methylpseudouracil
  modified_base 3960: mod_base = OTHER; note = N1-methylpseudouracil
  modified_base 3962: mod_base = OTHER; note = N1-methylpseudouracil
  modified_base 3963: mod_base = OTHER; note = N1-methylpseudouracil
  modified_base 3964: mod_base = OTHER; note = N1-methylpseudouracil
  modified_base 3965: mod_base = OTHER; note = N1-methylpseudouracil
  modified_base 3967: mod_base = OTHER; note = N1-methylpseudouracil
  modified_base 3969: mod_base = OTHER; note = N1-methylpseudouracil
  modified_base 3976: mod_base = OTHER; note = N1-methylpseudouracil
  modified_base 3977: mod_base = OTHER; note = N1-methylpseudouracil
  modified_base 3978: mod_base = OTHER; note = N1-methylpseudouracil
  modified_base 3989: mod_base = OTHER; note = N1-methylpseudouracil
  modified_base 3997: mod_base = OTHER; note = N1-methylpseudouracil
  modified_base 4006: mod_base = OTHER; note = N1-methylpseudouracil
  modified_base 4009: mod_base = OTHER; note = N1-methylpseudouracil
  modified_base 4022: mod_base = OTHER; note = N1-methylpseudouracil
  modified_base 4024: mod_base = OTHER; note = N1-methylpseudouracil
  modified_base 4031: mod_base = OTHER; note = N1-methylpseudouracil
  modified_base 4043: mod_base = OTHER; note = N1-methylpseudouracil
  modified_base 4049: mod_base = OTHER; note = N1-methylpseudouracil
  modified_base 4054: mod_base = OTHER; note = N1-methylpseudouracil
  modified_base 4058: mod_base = OTHER; note = N1-methylpseudouracil
  modified_base 4061: mod_base = OTHER; note = N1-methylpseudouracil
  modified_base 4069: mod_base = OTHER; note = N1-methylpseudouracil
  modified_base 4070: mod_base = OTHER; note = N1-methylpseudouracil
  modified_base 4082: mod_base = OTHER; note = N1-methylpseudouracil
  modified_base 4087: mod_base = OTHER; note = N1-methylpseudouracil
  modified_base 4088: mod_base = OTHER; note = N1-methylpseudouracil
  modified_base 4091: mod_base = OTHER; note = N1-methylpseudouracil
  modified_base 4094: mod_base = OTHER; note = N1-methylpseudouracil
  modified_base 4097: mod_base = OTHER; note = N1-methylpseudouracil
  modified_base 4108: mod_base = OTHER; note = N1-methylpseudouracil
  modified_base 4112: mod_base = OTHER; note = N1-methylpseudouracil
  modified_base 4115: mod_base = OTHER; note = N1-methylpseudouracil
  modified_base 4136: mod_base = OTHER; note = N1-methylpseudouracil
  modified_base 4139: mod_base = OTHER; note = N1-methylpseudouracil
  modified_base 4141: mod_base = OTHER; note = N1-methylpseudouracil
  modified_base 4145: mod_base = OTHER; note = N1-methylpseudouracil
  modified_base 4157: mod_base = OTHER; note = N1-methylpseudouracil
  modified_base 4160: mod_base = OTHER; note = N1-methylpseudouracil
  modified_base 4175: mod_base = OTHER; note = N1-methylpseudouracil
  modified_base 4178: mod_base = OTHER; note = N1-methylpseudouracil
  modified_base 4181: mod_base = OTHER; note = N1-methylpseudouracil
  modified_base 4184: mod_base = OTHER; note = N1-methylpseudouracil
  modified_base 4195: mod_base = OTHER; note = N1-methylpseudouracil
  modified_base 4205: mod_base = OTHER; note = N1-methylpseudouracil
  modified_base 4209: mod_base = OTHER; note = N1-methylpseudouracil
  modified_base 4214: mod_base = OTHER; note = N1-methylpseudouracil
  modified_base 4219: mod_base = OTHER; note = N1-methylpseudouracil
  modified_base 4226: mod_base = OTHER; note = N1-methylpseudouracil
  modified_base 4229: mod_base = OTHER; note = N1-methylpseudouracil
  modified_base 4241: mod_base = OTHER; note = N1-methylpseudouracil
  modified_base 4252: mod_base = OTHER; note = N1-methylpseudouracil
  modified_base 4253: mod_base = OTHER; note = N1-methylpseudouracil
  modified_base 4261: mod_base = OTHER; note = N1-methylpseudouracil
  modified_base 4268: mod_base = OTHER; note = N1-methylpseudouracil
  modified_base 4271: mod_base = OTHER; note = N1-methylpseudouracil
  modified_base 4274: mod_base = OTHER; note = N1-methylpseudouracil
  modified_base 4276: mod_base = OTHER; note = N1-methylpseudouracil
  modified_base 4289: mod_base = OTHER; note = N1-methylpseudouracil
  modified_base 4296: mod_base = OTHER; note = N1-methylpseudouracil
  modified_base 4298: mod_base = OTHER; note = N1-methylpseudouracil
  modified_base 4301: mod_base = OTHER; note = N1-methylpseudouracil
  modified_base 4306: mod_base = OTHER; note = N1-methylpseudouracil
  modified_base 4315: mod_base = OTHER; note = N1-methylpseudouracil
  modified_base 4316: mod_base = OTHER; note = N1-methylpseudouracil
  modified_base 4319: mod_base = OTHER; note = N1-methylpseudouracil
  modified_base 4322: mod_base = OTHER; note = N1-methylpseudouracil
  modified_base 4325: mod_base = OTHER; note = N1-methylpseudouracil
  modified_base 4340: mod_base = OTHER; note = N1-methylpseudouracil
  modified_base 4348: mod_base = OTHER; note = N1-methylpseudouracil
  modified_base 4354: mod_base = OTHER; note = N1-methylpseudouracil
  modified_base 4358: mod_base = OTHER; note = N1-methylpseudouracil
  modified_base 4367: mod_base = OTHER; note = N1-methylpseudouracil
  modified_base 4370: mod_base = OTHER; note = N1-methylpseudouracil
  modified_base 4385: mod_base = OTHER; note = N1-methylpseudouracil
  modified_base 4387: mod_base = OTHER; note = N1-methylpseudouracil
  modified_base 4388: mod_base = OTHER; note = N1-methylpseudouracil
  modified_base 4398: mod_base = OTHER; note = N1-methylpseudouracil
  modified_base 4400: mod_base = OTHER; note = N1-methylpseudouracil
  modified_base 4402: mod_base = OTHER; note = N1-methylpseudouracil
  modified_base 4404: mod_base = OTHER; note = N1-methylpseudouracil
  modified_base 4413: mod_base = OTHER; note = N1-methylpseudouracil
  modified_base 4418: mod_base = OTHER; note = N1-methylpseudouracil
  modified_base 4424: mod_base = OTHER; note = N1-methylpseudouracil
  modified_base 4426: mod_base = OTHER; note = N1-methylpseudouracil
  modified_base 4427: mod_base = OTHER; note = N1-methylpseudouracil
  modified_base 4431: mod_base = OTHER; note = N1-methylpseudouracil
  modified_base 4450: mod_base = OTHER; note = N1-methylpseudouracil
  modified_base 4456: mod_base = OTHER; note = N1-methylpseudouracil
  modified_base 4458: mod_base = OTHER; note = N1-methylpseudouracil
  modified_base 4469: mod_base = OTHER; note = N1-methylpseudouracil
  modified_base 4478: mod_base = OTHER; note = N1-methylpseudouracil
  modified_base 4502: mod_base = OTHER; note = N1-methylpseudouracil
  modified_base 4509: mod_base = OTHER; note = N1-methylpseudouracil
  modified_base 4517: mod_base = OTHER; note = N1-methylpseudouracil
  modified_base 4519: mod_base = OTHER; note = N1-methylpseudouracil
  modified_base 4523: mod_base = OTHER; note = N1-methylpseudouracil
  modified_base 4525: mod_base = OTHER; note = N1-methylpseudouracil
  modified_base 4530: mod_base = OTHER; note = N1-methylpseudouracil
  modified_base 4537: mod_base = OTHER; note = N1-methylpseudouracil
  modified_base 4540: mod_base = OTHER; note = N1-methylpseudouracil
  modified_base 4549: mod_base = OTHER; note = N1-methylpseudouracil
  modified_base 4551: mod_base = OTHER; note = N1-methylpseudouracil
  modified_base 4553: mod_base = OTHER; note = N1-methylpseudouracil
  modified_base 4558: mod_base = OTHER; note = N1-methylpseudouracil
  modified_base 4560: mod_base = OTHER; note = N1-methylpseudouracil
  modified_base 4561: mod_base = OTHER; note = N1-methylpseudouracil
  modified_base 4569: mod_base = OTHER; note = N1-methylpseudouracil
  modified_base 4579: mod_base = OTHER; note = N1-methylpseudouracil
  modified_base 4582: mod_base = OTHER; note = N1-methylpseudouracil
  modified_base 4583: mod_base = OTHER; note = N1-methylpseudouracil
  modified_base 4586: mod_base = OTHER; note = N1-methylpseudouracil
  modified_base 4588: mod_base = OTHER; note = N1-methylpseudouracil
  modified_base 4596: mod_base = OTHER; note = N1-methylpseudouracil
  modified_base 4597: mod_base = OTHER; note = N1-methylpseudouracil
  modified_base 4600: mod_base = OTHER; note = N1-methylpseudouracil
  modified_base 4608: mod_base = OTHER; note = N1-methylpseudouracil
  modified_base 4611: mod_base = OTHER; note = N1-methylpseudouracil
  modified_base 4613: mod_base = OTHER; note = N1-methylpseudouracil
  modified_base 4614: mod_base = OTHER; note = N1-methylpseudouracil
  modified_base 4615: mod_base = OTHER; note = N1-methylpseudouracil
  modified_base 4619: mod_base = OTHER; note = N1-methylpseudouracil
  modified_base 4624: mod_base = OTHER; note = N1-methylpseudouracil
  modified_base 4626: mod_base = OTHER; note = N1-methylpseudouracil
  modified_base 4630: mod_base = OTHER; note = N1-methylpseudouracil
  modified_base 4738: mod_base = OTHER; note = N1-methylpseudouracil
  modified_base 4740: mod_base = OTHER; note = N1-methylpseudouracil
  modified_base 4763: mod_base = OTHER; note = Inverted deoxythymidine
  misc_feature 1..4762: note = RNA
  misc_feature 4763: note = DNA
ggaggaaatcgcaaaatttgctcttcgcgttagatttcttttagttttctcgcaactagcaagctttttgttctcgccatgcagcggagccctctggagaaggccagcgtggtgagcaagctgttcttcagctggaccaggcccatcctgcgaaagggctacagacagaggctggagctgtccgacatctaccagattccatccgtggacagcgccgacaatctgagcgagaagctggagagggagtgggaccgcgagctggccagcaagaagaaccctaagctgatcaacgccctgcgccgctgcttcttctggaggttcatgttctacggcatcttcctgtacctgggcgaggtgaccaaggccgtccagcctctgctgctgggccgcatcatcgccagctacgatcccgacaacaaggaggaacgctccatcgccatctacctgggcatcggcctgtgtctgctgttcatcgtgcggaccctgctgctgcaccccgccatcttcggcctgcatcacatcggcatgcagatgaggatcgccatgttctccctgatctacaagaagaccctgaagctgtccagccgcgtgctggataagatcagcatcgggcagctggtgagcctgctgagcaacaacctgaacaagttcgacgaggggttggcgctggcccacttcgtgtggattgccccgctgcaggtggctctgctgatggggctgatctgggagctgctgcaggcctctgccttctgcgggctggggtttctgatcgtgctggccctgttccaagctggcctgggccgcatgatgatgaagtaccgcgatcagagggccggcaagatcagcgagcgcctggtgatcactagcgagatgatagagaacatccagagcgtgaaggcttactgttgggaggaggccatggagaagatgatcgagaacctgaggcagaccgagctgaagctgactagaaaggcagcctacgtgaggtatttcaactccagcgccttcttcttcagcggcttcttcgtggtgttcctgagcgtgctgccctacgccctgatcaagggcatcatcctgaggaagatcttcaccaccattagcttctgcatcgtgctgcgcatggccgtgaccaggcagttcccttgggccgtgcagacttggtacgacagcctgggagccatcaacaagatccaggactttctgcagaagcaggaatataagaccctggagtacaacctgaccaccaccgaggtggtgatggagaacgtgaccgccttctgggaggagggcttcggcgagctgttcgagaaggccaagcagaacaataacaaccgcaagaccagcaacggcgacgactccctcttcttcagcaactttagcctgctgggcacccctgtgctgaaggacatcaacttcaagatcgaaagaggccaactgctggccgtggccggatctaccggcgccggcaagaccagcctgctgatgatgatcatgggcgagctggagcccagcgagggcaagatcaagcacagcggccggatctccttctgctcccagttctcctggatcatgcccggcaccatcaaggagaacatcatcttcggcgtgagctacgacgagtacaggtaccggagcgtgatcaaggcctgccagctggaggaggacatctccaaatttgccgagaaggacaacattgtgctgggcgaaggcgggatcaccctgtccggtggccagcgtgcacgcatctccctggcccgggctgtgtacaaggacgccgacctgtacctgctggacagcccttttggctacctggacgtgctgaccgagaaggagatcttcgagtcctgcgtgtgtaagctgatggccaacaagaccagaatcctggtgaccagcaagatggagcatctgaagaaggccgacaagatcctgatcctgcacgaggggtccagctacttctacggcaccttcagcgagctgcagaacctgcagcccgacttcagctccaagctgatgggctgcgatagcttcgaccagttctccgccgagagaaggaactccattctgaccgagaccctgcaccgattctccctggagggagacgccccagtgagctggaccgagaccaagaagcagagcttcaagcagaccggcgagttcggagagaagcgcaagaactccatcctcaaccccatcaacagcatccggaagttcagcatcgtgcagaagacccctctgcagatgaacgggatcgaggaggacagcgacgagcccctggaacggcgactgtccctcgtgcccgacagcgagcagggcgaggccatcctgccccggatctccgtgatctccactgggcccaccctgcaagcccgacggcggcaaagcgtgctgaacctgatgacccacagcgtgaaccagggccagaatatccaccgcaagactacagccagcacccgcaaggtgagcctggctccccaggccaacctgaccgagctggacatctacagcaggaggctgagccaggagacaggcctggagatcagcgaggagatcaacgaggaggacctgaaggagtgcttcttcgacgacatggagtccatccccgccgtgaccacctggaacacctacctgagatacatcaccgtgcacaagagcctgatcttcgtgctgatctggtgcctggtgatcttcttggccgaggtagccgcctcactggtggtgctgtggctgctgggcaataccccactgcaggacaaggggaactccacccacagccggaacaacagctacgccgtgatcatcacctccaccagcagctactacgtgttctacatctacgtgggcgtggccgacacactgctggccatgggcttcttcagaggcctccctctggtgcacacactgatcaccgtgagcaagatcctgcaccacaagatgctgcacagcgtgctgcaggctcccatgtcaaccctgaacaccctgaaggccggcggcatcctgaacaggttcagcaaggacatcgccattctggacgatctgctgcccctgaccatcttcgacttcatccagctgctgctgatcgtgatcggggccatcgccgtggtggccgtgctgcagccctacatcttcgtggccacagtgcccgtgatcgtggccttcatcatgctgcgcgcctacttcctgcagacctcccagcagctgaagcagctggagagcgaaggccgcagccccatcttcacccacctggtgactagcctgaaggggctgtggaccctgcgcgccttcggcaggcagccctacttcgagaccctgttccacaaggctctgaacctgcacaccgccaactggttcctgtacctcagcaccctgcgctggttccagatgcggatcgagatgatcttcgtgatcttcttcatcgccgtgaccttcatctccatcctgaccaccggggaaggcgagggacgggtgggaatcatcctgaccctggccatgaatatcatgagcaccctgcagtgggccgtgaacagcagcatcgacgtggacagcctgatgcggtccgtgtcccgggtgttcaagttcatcgacatgcccaccgagggcaagcccaccaagagcaccaagccctacaagaacggccagctgagcaaggtgatgattatcgagaacagccacgtgaagaaggacgacatctggccttccggcggccagatgaccgtgaaggacctgaccgccaagtacaccgagggcggcaacgccatcctggagaacatcagcttctccattagccctggacagcgggtgggcctgttgggacggaccggcagtgggaagagcaccctgctgtccgccttcctgcggctgctgaacacggagggcgagatccagatcgacggggtgagctgggacagcatcaccctgcagcagtggcgaaaggccttcggcgtgatcccacagaaggtgtttattttctctggcacctttaggaagaacctggacccctacgagcagtggtccgaccaggagatctggaaggtggccgacgaggtgggcctgcggtcagtgatcgagcagttccccggcaagctggacttcgtgctggtggacggcggctgcgtgctgagccacggccacaagcagctgatgtgcctggcacgcagcgtgctgagcaaggccaagatcctgctgctggacgagccctccgcgcacctggatcccgtgacctaccagatcatcaggcggaccctgaagcaggccttcgccgactgcaccgtgatcctgtgcgagcacagaatcgaggctatgctggagtgccagcagttcctggtgatcgaggagaacaaggtgcggcagtacgactccatccagaagctgctgaacgagcgcagcctgttcagacaggctatctctcccagcgatcgcgtgaagctgttccctcacaggaacagcagcaagtgcaagtctaagccacagatcgccgccctgaaggaggagaccgaggaggaggtgcaggatacccgcctgtaagtctaagctggagcctcctgagagacctgtgtgaactattgagaagatcggaacagctccttactctgaggaagttggtacccccgtggtctttgaataaagtctgagtgggcggcaaaaaaaaaaaaaaaaaaaaaaaaaaaaaaaaaaaaaaaaaaaaaaaaaaaaaaaaaaaaaaaaaaaaaaaaaaaaaaaaaaaaaaaaaaaaaaaaaaaatctagaaaaaaaaaaaaaaaaaaaat

SEQ ID NO: 12 - RNA, 4737 nt, synthetic construct
  source 1..4737: mol_type = other RNA
  modified_base 1: mod_base = OTHER; note = 7-Methylguanosine with triphosphate linkage
  modified_base 2: mod_base = OTHER; note = 2'-O-methyl modified nucleotide
  modified_base 9: mod_base = OTHER; note = N1-methylpseudouracil
  modified_base 17: mod_base = OTHER; note = N1-methylpseudouracil
  modified_base 18: mod_base = OTHER; note = N1-methylpseudouracil
  modified_base 19: mod_base = OTHER; note = N1-methylpseudouracil
  modified_base 22: mod_base = OTHER; note = N1-methylpseudouracil
  modified_base 24: mod_base = OTHER; note = N1-methylpseudouracil
  modified_base 25: mod_base = OTHER; note = N1-methylpseudouracil
  modified_base 30: mod_base = OTHER; note = N1-methylpseudouracil
  modified_base 31: mod_base = OTHER; note = N1-methylpseudouracil
  modified_base 35: mod_base = OTHER; note = N1-methylpseudouracil
  modified_base 36: mod_base = OTHER; note = N1-methylpseudouracil
  modified_base 37: mod_base = OTHER; note = N1-methylpseudouracil
  modified_base 39: mod_base = OTHER; note = N1-methylpseudouracil
  modified_base 40: mod_base = OTHER; note = N1-methylpseudouracil
  modified_base 41: mod_base = OTHER; note = N1-methylpseudouracil
  modified_base 42: mod_base = OTHER; note = N1-methylpseudouracil
  modified_base 45: mod_base = OTHER; note = N1-methylpseudouracil
  modified_base 46: mod_base = OTHER; note = N1-methylpseudouracil
  modified_base 47: mod_base = OTHER; note = N1-methylpseudouracil
  modified_base 48: mod_base = OTHER; note = N1-methylpseudouracil
  modified_base 50: mod_base = OTHER; note = N1-methylpseudouracil
  modified_base 57: mod_base = OTHER; note = N1-methylpseudouracil
  modified_base 65: mod_base = OTHER; note = N1-methylpseudouracil
  modified_base 66: mod_base = OTHER; note = N1-methylpseudouracil
  modified_base 67: mod_base = OTHER; note = N1-methylpseudouracil
  modified_base 68: mod_base = OTHER; note = N1-methylpseudouracil
  modified_base 69: mod_base = OTHER; note = N1-methylpseudouracil
  modified_base 71: mod_base = OTHER; note = N1-methylpseudouracil
  modified_base 72: mod_base = OTHER; note = N1-methylpseudouracil
  modified_base 74: mod_base = OTHER; note = N1-methylpseudouracil
  modified_base 80: mod_base = OTHER; note = N1-methylpseudouracil
  modified_base 93: mod_base = OTHER; note = N1-methylpseudouracil
  modified_base 95: mod_base = OTHER; note = N1-methylpseudouracil
  modified_base 110: mod_base = OTHER; note = N1-methylpseudouracil
  modified_base 113: mod_base = OTHER; note = N1-methylpseudouracil
  modified_base 122: mod_base = OTHER; note = N1-methylpseudouracil
  modified_base 124: mod_base = OTHER; note = N1-methylpseudouracil
  modified_base 125: mod_base = OTHER; note = N1-methylpseudouracil
  modified_base 127: mod_base = OTHER; note = N1-methylpseudouracil
  modified_base 128: mod_base = OTHER; note = N1-methylpseudouracil
  modified_base 133: mod_base = OTHER; note = N1-methylpseudouracil
  modified_base 146: mod_base = OTHER; note = N1-methylpseudouracil
  modified_base 149: mod_base = OTHER; note = N1-methylpseudouracil
  modified_base 160: mod_base = OTHER; note = N1-methylpseudouracil
  modified_base 173: mod_base = OTHER; note = N1-methylpseudouracil
  modified_base 179: mod_base = OTHER; note = N1-methylpseudouracil
  modified_base 181: mod_base = OTHER; note = N1-methylpseudouracil
  modified_base 188: mod_base = OTHER; note = N1-methylpseudouracil
  modified_base 190: mod_base = OTHER; note = N1-methylpseudouracil
  modified_base 197: mod_base = OTHER; note = N1-methylpseudouracil
  modified_base 198: mod_base = OTHER; note = N1-methylpseudouracil
  modified_base 202: mod_base = OTHER; note = N1-methylpseudouracil
  modified_base 206: mod_base = OTHER; note = N1-methylpseudouracil
  modified_base 222: mod_base = OTHER; note = N1-methylpseudouracil
  modified_base 224: mod_base = OTHER; note = N1-methylpseudouracil
  modified_base 236: mod_base = OTHER; note = N1-methylpseudouracil
  modified_base 247: mod_base = OTHER; note = N1-methylpseudouracil
  modified_base 260: mod_base = OTHER; note = N1-methylpseudouracil
  modified_base 279: mod_base = OTHER; note = N1-methylpseudouracil
  modified_base 284: mod_base = OTHER; note = N1-methylpseudouracil
  modified_base 287: mod_base = OTHER; note = N1-methylpseudouracil
  modified_base 296: mod_base = OTHER; note = N1-methylpseudouracil
  modified_base 304: mod_base = OTHER; note = N1-methylpseudouracil
  modified_base 307: mod_base = OTHER; note = N1-methylpseudouracil
  modified_base 308: mod_base = OTHER; note = N1-methylpseudouracil
  modified_base 310: mod_base = OTHER; note = N1-methylpseudouracil
  modified_base 311: mod_base = OTHER; note = N1-methylpseudouracil
  modified_base 313: mod_base = OTHER; note = N1-methylpseudouracil
  modified_base 319: mod_base = OTHER; note = N1-methylpseudouracil
  modified_base 320: mod_base = OTHER; note = N1-methylpseudouracil
  modified_base 323: mod_base = OTHER; note = N1-methylpseudouracil
  modified_base 325: mod_base = OTHER; note = N1-methylpseudouracil
  modified_base 326: mod_base = OTHER; note = N1-methylpseudouracil
  modified_base 328: mod_base = OTHER; note = N1-methylpseudouracil
  modified_base 335: mod_base = OTHER; note = N1-methylpseudouracil
  modified_base 337: mod_base = OTHER; note = N1-methylpseudouracil
  modified_base 338: mod_base = OTHER; note = N1-methylpseudouracil
  modified_base 341: mod_base = OTHER; note = N1-methylpseudouracil
  modified_base 343: mod_base = OTHER; note = N1-methylpseudouracil
  modified_base 347: mod_base = OTHER; note = N1-methylpseudouracil
  modified_base 356: mod_base = OTHER; note = N1-methylpseudouracil
  modified_base 368: mod_base = OTHER; note = N1-methylpseudouracil
  modified_base 375: mod_base = OTHER; note = N1-methylpseudouracil
  modified_base 377: mod_base = OTHER; note = N1-methylpseudouracil
  modified_base 380: mod_base = OTHER; note = N1-methylpseudouracil
  modified_base 383: mod_base = OTHER; note = N1-methylpseudouracil
  modified_base 392: mod_base = OTHER; note = N1-methylpseudouracil
  modified_base 395: mod_base = OTHER; note = N1-methylpseudouracil
  modified_base 403: mod_base = OTHER; note = N1-methylpseudouracil
  modified_base 408: mod_base = OTHER; note = N1-methylpseudouracil
  modified_base 430: mod_base = OTHER; note = N1-methylpseudouracil
  modified_base 434: mod_base = OTHER; note = N1-methylpseudouracil
  modified_base 440: mod_base = OTHER; note = N1-methylpseudouracil
  modified_base 442: mod_base = OTHER; note = N1-methylpseudouracil
  modified_base 446: mod_base = OTHER; note = N1-methylpseudouracil
  modified_base 452: mod_base = OTHER; note = N1-methylpseudouracil
  modified_base 458: mod_base = OTHER; note = N1-methylpseudouracil
  modified_base 460: mod_base = OTHER; note = N1-methylpseudouracil
  modified_base 462: mod_base = OTHER; note = N1-methylpseudouracil
  modified_base 464: mod_base = OTHER; note = N1-methylpseudouracil
  modified_base 467: mod_base = OTHER; note = N1-methylpseudouracil
  modified_base 469: mod_base = OTHER; note = N1-methylpseudouracil
  modified_base 470: mod_base = OTHER; note = N1-methylpseudouracil
  modified_base 473: mod_base = OTHER; note = N1-methylpseudouracil
  modified_base 476: mod_base = OTHER; note = N1-methylpseudouracil
  modified_base 485: mod_base = OTHER; note = N1-methylpseudouracil
  modified_base 488: mod_base = OTHER; note = N1-methylpseudouracil
  modified_base 491: mod_base = OTHER; note = N1-methylpseudouracil
  modified_base 503: mod_base = OTHER; note = N1-methylpseudouracil
  modified_base 505: mod_base = OTHER; note = N1-methylpseudouracil
  modified_base 506: mod_base = OTHER; note = N1-methylpseudouracil
  modified_base 512: mod_base = OTHER; note = N1-methylpseudouracil
  modified_base 516: mod_base = OTHER; note = N1-methylpseudouracil
  modified_base 521: mod_base = OTHER; note = N1-methylpseudouracil
  modified_base 527: mod_base = OTHER; note = N1-methylpseudouracil
  modified_base 533: mod_base = OTHER; note = N1-methylpseudouracil
  modified_base 539: mod_base = OTHER; note = N1-methylpseudouracil
  modified_base 545: mod_base = OTHER; note = N1-methylpseudouracil
  modified_base 547: mod_base = OTHER; note = N1-methylpseudouracil
  modified_base 548: mod_base = OTHER; note = N1-methylpseudouracil
  modified_base 550: mod_base = OTHER; note = N1-methylpseudouracil
  modified_base 554: mod_base = OTHER; note = N1-methylpseudouracil
  modified_base 557: mod_base = OTHER; note = N1-methylpseudouracil
  modified_base 559: mod_base = OTHER; note = N1-methylpseudouracil
  modified_base 572: mod_base = OTHER; note = N1-methylpseudouracil
  modified_base 578: mod_base = OTHER; note = N1-methylpseudouracil
  modified_base 580: mod_base = OTHER; note = N1-methylpseudouracil
  modified_base 590: mod_base = OTHER; note = N1-methylpseudouracil
  modified_base 593: mod_base = OTHER; note = N1-methylpseudouracil
  modified_base 597: mod_base = OTHER; note = N1-methylpseudouracil
  modified_base 602: mod_base = OTHER; note = N1-methylpseudouracil
  modified_base 608: mod_base = OTHER; note = N1-methylpseudouracil
  modified_base 617: mod_base = OTHER; note = N1-methylpseudouracil
  modified_base 620: mod_base = OTHER; note = N1-methylpseudouracil
  modified_base 626: mod_base = OTHER; note = N1-methylpseudouracil
  modified_base 629: mod_base = OTHER; note = N1-methylpseudouracil
  modified_base 641: mod_base = OTHER; note = N1-methylpseudouracil
  modified_base 649: mod_base = OTHER; note = N1-methylpseudouracil
  modified_base 650: mod_base = OTHER; note = N1-methylpseudouracil
  modified_base 661: mod_base = OTHER; note = N1-methylpseudouracil
  modified_base 662: mod_base = OTHER; note = N1-methylpseudouracil
  modified_base 668: mod_base = OTHER; note = N1-methylpseudouracil
  modified_base 676: mod_base = OTHER; note = N1-methylpseudouracil
  modified_base 677: mod_base = OTHER; note = N1-methylpseudouracil
  modified_base 680: mod_base = OTHER; note = N1-methylpseudouracil
  modified_base 682: mod_base = OTHER; note = N1-methylpseudouracil
  modified_base 686: mod_base = OTHER; note = N1-methylpseudouracil
  modified_base 687: mod_base = OTHER; note = N1-methylpseudouracil
  modified_base 695: mod_base = OTHER; note = N1-methylpseudouracil
  modified_base 701: mod_base = OTHER; note = N1-methylpseudouracil
  modified_base 705: mod_base = OTHER; note = N1-methylpseudouracil
  modified_base 707: mod_base = OTHER; note = N1-methylpseudouracil
  modified_base 710: mod_base = OTHER; note = N1-methylpseudouracil
  modified_base 713: mod_base = OTHER; note = N1-methylpseudouracil
  modified_base 719: mod_base = OTHER; note = N1-methylpseudouracil
  modified_base 722: mod_base = OTHER; note = N1-methylpseudouracil
  modified_base 724: mod_base = OTHER; note = N1-methylpseudouracil
  modified_base 731: mod_base = OTHER; note = N1-methylpseudouracil
  modified_base 734: mod_base = OTHER; note = N1-methylpseudouracil
  modified_base 742: mod_base = OTHER; note = N1-methylpseudouracil
  modified_base 744: mod_base = OTHER; note = N1-methylpseudouracil
  modified_base 748: mod_base = OTHER; note = N1-methylpseudouracil
  modified_base 749: mod_base = OTHER; note = N1-methylpseudouracil
  modified_base 751: mod_base = OTHER; note = N1-methylpseudouracil
  modified_base 758: mod_base = OTHER; note = N1-methylpseudouracil
  modified_base 763: mod_base = OTHER; note = N1-methylpseudouracil
  modified_base 764: mod_base = OTHER; note = N1-methylpseudouracil
  modified_base 765: mod_base = OTHER; note = N1-methylpseudouracil
  modified_base 767: mod_base = OTHER; note = N1-methylpseudouracil
  modified_base 770: mod_base = OTHER; note = N1-methylpseudouracil
  modified_base 773: mod_base = OTHER; note = N1-methylpseudouracil
  modified_base 776: mod_base = OTHER; note = N1-methylpseudouracil
  modified_base 782: mod_base = OTHER; note = N1-methylpseudouracil
  modified_base 784: mod_base = OTHER; note = N1-methylpseudouracil
  modified_base 785: mod_base = OTHER; note = N1-methylpseudouracil
  modified_base 792: mod_base = OTHER; note = N1-methylpseudouracil
  modified_base 797: mod_base = OTHER; note = N1-methylpseudouracil
  modified_base 806: mod_base = OTHER; note = N1-methylpseudouracil
  modified_base 809: mod_base = OTHER; note = N1-methylpseudouracil
  modified_base 812: mod_base = OTHER; note = N1-methylpseudouracil
  modified_base 817: mod_base = OTHER; note = N1-methylpseudouracil
  modified_base 825: mod_base = OTHER; note = N1-methylpseudouracil
  modified_base 842: mod_base = OTHER; note = N1-methylpseudouracil
  modified_base 854: mod_base = OTHER; note = N1-methylpseudouracil
  modified_base 857: mod_base = OTHER; note = N1-methylpseudouracil
  modified_base 860: mod_base = OTHER; note = N1-methylpseudouracil
  modified_base 864: mod_base = OTHER; note = N1-methylpseudouracil
  modified_base 872: mod_base = OTHER; note = N1-methylpseudouracil
  modified_base 875: mod_base = OTHER; note = N1-methylpseudouracil
  modified_base 884: mod_base = OTHER; note = N1-methylpseudouracil
  modified_base 893: mod_base = OTHER; note = N1-methylpseudouracil
  modified_base 900: mod_base = OTHER; note = N1-methylpseudouracil
  modified_base 901: mod_base = OTHER; note = N1-methylpseudouracil
  modified_base 904: mod_base = OTHER; note = N1-methylpseudouracil
  modified_base 906: mod_base = OTHER; note = N1-methylpseudouracil
  modified_base 907: mod_base = OTHER; note = N1-methylpseudouracil
  modified_base 920: mod_base = OTHER; note = N1-methylpseudouracil
  modified_base 929: mod_base = OTHER; note = N1-methylpseudouracil
  modified_base 932: mod_base = OTHER; note = N1-methylpseudouracil
  modified_base 941: mod_base = OTHER; note = N1-methylpseudouracil
  modified_base 956: mod_base = OTHER; note = N1-methylpseudouracil
  modified_base 962: mod_base = OTHER; note = N1-methylpseudouracil
  modified_base 966: mod_base = OTHER; note = N1-methylpseudouracil
  modified_base 979: mod_base = OTHER; note = N1-methylpseudouracil
  modified_base 983: mod_base = OTHER; note = N1-methylpseudouracil
  modified_base 988: mod_base = OTHER; note = N1-methylpseudouracil
  modified_base 990: mod_base = OTHER; note = N1-methylpseudouracil
  modified_base 991: mod_base = OTHER; note = N1-methylpseudouracil
  modified_base 992: mod_base = OTHER; note = N1-methylpseudouracil
  modified_base 997: mod_base = OTHER; note = N1-methylpseudouracil
  modified_base 1006: mod_base = OTHER; note = N1-methylpseudouracil
  modified_base 1007: mod_base = OTHER; note = N1-methylpseudouracil
  modified_base 1009: mod_base = OTHER; note = N1-methylpseudouracil
  modified_base 1010: mod_base = OTHER; note = N1-methylpseudouracil
  modified_base 1012: mod_base = OTHER; note = N1-methylpseudouracil
  modified_base 1013: mod_base = OTHER; note = N1-methylpseudouracil
  modified_base 1021: mod_base = OTHER; note = N1-methylpseudouracil
  modified_base 1022: mod_base = OTHER; note = N1-methylpseudouracil
  modified_base 1024: mod_base = OTHER; note = N1-methylpseudouracil
  modified_base 1025: mod_base = OTHER; note = N1-methylpseudouracil
  modified_base 1028: mod_base = OTHER; note = N1-methylpseudouracil
  modified_base 1031: mod_base = OTHER; note = N1-methylpseudouracil
  modified_base 1033: mod_base = OTHER; note = N1-methylpseudouracil
  modified_base 1034: mod_base = OTHER; note = N1-methylpseudouracil
  modified_base 1037: mod_base = OTHER; note = N1-methylpseudouracil
  modified_base 1043: mod_base = OTHER; note = N1-methylpseudouracil
  modified_base 1046: mod_base = OTHER; note = N1-methylpseudouracil
  modified_base 1051: mod_base = OTHER; note = N1-methylpseudouracil
  modified_base 1058: mod_base = OTHER; note = N1-methylpseudouracil
  modified_base 1061: mod_base = OTHER; note = N1-methylpseudouracil
  modified_base 1070: mod_base = OTHER; note = N1-methylpseudouracil
  modified_base 1073: mod_base = OTHER; note = N1-methylpseudouracil
  modified_base 1076: mod_base = OTHER; note = N1-methylpseudouracil
  modified_base 1085: mod_base = OTHER; note = N1-methylpseudouracil
  modified_base 1087: mod_base = OTHER; note = N1-methylpseudouracil
  modified_base 1088: mod_base = OTHER; note = N1-methylpseudouracil
  modified_base 1097: mod_base = OTHER; note = N1-methylpseudouracil
  modified_base 1098: mod_base = OTHER; note = N1-methylpseudouracil
  modified_base 1102: mod_base = OTHER; note = N1-methylpseudouracil
  modified_base 1103: mod_base = OTHER; note = N1-methylpseudouracil
  modified_base 1105: mod_base = OTHER; note = N1-methylpseudouracil
  modified_base 1109: mod_base = OTHER; note = N1-methylpseudouracil
  modified_base 1112: mod_base = OTHER; note = N1-methylpseudouracil
  modified_base 1115: mod_base = OTHER; note = N1-methylpseudouracil
  modified_base 1121: mod_base = OTHER; note = N1-methylpseudouracil
  modified_base 1127: mod_base = OTHER; note = N1-methylpseudouracil
  modified_base 1138: mod_base = OTHER; note = N1-methylpseudouracil
  modified_base 1139: mod_base = OTHER; note = N1-methylpseudouracil
  modified_base 1143: mod_base = OTHER; note = N1-methylpseudouracil
  modified_base 1144: mod_base = OTHER; note = N1-methylpseudouracil
  modified_base 1151: mod_base = OTHER; note = N1-methylpseudouracil
  modified_base 1158: mod_base = OTHER; note = N1-methylpseudouracil
  modified_base 1159: mod_base = OTHER; note = N1-methylpseudouracil
  modified_base 1162: mod_base = OTHER; note = N1-methylpseudouracil
  modified_base 1172: mod_base = OTHER; note = N1-methylpseudouracil
  modified_base 1181: mod_base = OTHER; note = N1-methylpseudouracil
  modified_base 1190: mod_base = OTHER; note = N1-methylpseudouracil
  modified_base 1198: mod_base = OTHER; note = N1-methylpseudouracil
  modified_base 1199: mod_base = OTHER; note = N1-methylpseudouracil
  modified_base 1200: mod_base = OTHER; note = N1-methylpseudouracil
  modified_base 1202: mod_base = OTHER; note = N1-methylpseudouracil
  modified_base 1216: mod_base = OTHER; note = N1-methylpseudouracil
  modified_base 1218: mod_base = OTHER; note = N1-methylpseudouracil
  modified_base 1226: mod_base = OTHER; note = N1-methylpseudouracil
  modified_base 1231: mod_base = OTHER; note = N1-methylpseudouracil
  modified_base 1238: mod_base = OTHER; note = N1-methylpseudouracil
  modified_base 1253: mod_base = OTHER; note = N1-methylpseudouracil
  modified_base 1256: mod_base = OTHER; note = N1-methylpseudouracil
  modified_base 1259: mod_base = OTHER; note = N1-methylpseudouracil
  modified_base 1268: mod_base = OTHER; note = N1-methylpseudouracil
  modified_base 1276: mod_base = OTHER; note = N1-methylpseudouracil
  modified_base 1277: mod_base = OTHER; note = N1-methylpseudouracil
  modified_base 1279: mod_base = OTHER; note = N1-methylpseudouracil
  modified_base 1291: mod_base = OTHER; note = N1-methylpseudouracil
  modified_base 1292: mod_base = OTHER; note = N1-methylpseudouracil
  modified_base 1301: mod_base = OTHER; note = N1-methylpseudouracil
  modified_base 1303: mod_base = OTHER; note = N1-methylpseudouracil
  modified_base 1304: mod_base = OTHER; note = N1-methylpseudouracil
  modified_base 1326: mod_base = OTHER; note = N1-methylpseudouracil
  modified_base 1357: mod_base = OTHER; note = N1-methylpseudouracil
  modified_base 1361: mod_base = OTHER; note = N1-methylpseudouracil
  modified_base 1363: mod_base = OTHER; note = N1-methylpseudouracil
  modified_base 1364: mod_base = OTHER; note = N1-methylpseudouracil
  modified_base 1366: mod_base = OTHER; note = N1-methylpseudouracil
  modified_base 1367: mod_base = OTHER; note = N1-methylpseudouracil
  modified_base 1375: mod_base = OTHER; note = N1-methylpseudouracil
  modified_base 1376: mod_base = OTHER; note = N1-methylpseudouracil
  modified_base 1377: mod_base = OTHER; note = N1-methylpseudouracil
  modified_base 1382: mod_base = OTHER; note = N1-methylpseudouracil
  modified_base 1385: mod_base = OTHER; note = N1-methylpseudouracil
  modified_base 1395: mod_base = OTHER; note = N1-methylpseudouracil
  modified_base 1397: mod_base = OTHER; note = N1-methylpseudouracil
  modified_base 1400: mod_base = OTHER; note = N1-methylpseudouracil
  modified_base 1409: mod_base = OTHER; note = N1-methylpseudouracil
  modified_base 1414: mod_base = OTHER; note = N1-methylpseudouracil
  modified_base 1415: mod_base = OTHER; note = N1-methylpseudouracil
  modified_base 1421: mod_base = OTHER; note = N1-methylpseudouracil
  modified_base 1436: mod_base = OTHER; note = N1-methylpseudouracil
  modified_base 1439: mod_base = OTHER; note = N1-methylpseudouracil
  modified_base 1445: mod_base = OTHER; note = N1-methylpseudouracil
  modified_base 1453: mod_base = OTHER; note = N1-methylpseudouracil
  modified_base 1455: mod_base = OTHER; note = N1-methylpseudouracil
  modified_base 1478: mod_base = OTHER; note = N1-methylpseudouracil
  modified_base 1481: mod_base = OTHER; note = N1-methylpseudouracil
  modified_base 1484: mod_base = OTHER; note = N1-methylpseudouracil
  modified_base 1487: mod_base = OTHER; note = N1-methylpseudouracil
  modified_base 1490: mod_base = OTHER; note = N1-methylpseudouracil
  modified_base 1493: mod_base = OTHER; note = N1-methylpseudouracil
  modified_base 1502: mod_base = OTHER; note = N1-methylpseudouracil
  modified_base 1523: mod_base = OTHER; note = N1-methylpseudouracil
  modified_base 1541: mod_base = OTHER; note = N1-methylpseudouracil
  modified_base 1543: mod_base = OTHER; note = N1-methylpseudouracil
  modified_base 1546: mod_base = OTHER; note = N1-methylpseudouracil
  modified_base 1547: mod_base = OTHER; note = N1-methylpseudouracil
  modified_base 1549: mod_base = OTHER; note = N1-methylpseudouracil
  modified_base 1552: mod_base = OTHER; note = N1-methylpseudouracil
  modified_base 1558: mod_base = OTHER; note = N1-methylpseudouracil
  modified_base 1559: mod_base = OTHER; note = N1-methylpseudouracil
  modified_base 1561: mod_base = OTHER; note = N1-methylpseudouracil
  modified_base 1564: mod_base = OTHER; note = N1-methylpseudouracil
  modified_base 1568: mod_base = OTHER; note = N1-methylpseudouracil
  modified_base 1571: mod_base = OTHER; note = N1-methylpseudouracil
  modified_base 1583: mod_base = OTHER; note = N1-methylpseudouracil
  modified_base 1595: mod_base = OTHER; note = N1-methylpseudouracil
  modified_base 1598: mod_base = OTHER; note = N1-methylpseudouracil
  modified_base 1600: mod_base = OTHER; note = N1-methylpseudouracil
  modified_base 1601: mod_base = OTHER; note = N1-methylpseudouracil
  modified_base 1607: mod_base = OTHER; note = N1-methylpseudouracil
  modified_base 1612: mod_base = OTHER; note = N1-methylpseudouracil
  modified_base 1621: mod_base = OTHER; note = N1-methylpseudouracil
  modified_base 1627: mod_base = OTHER; note = N1-methylpseudouracil
  modified_base 1637: mod_base = OTHER; note = N1-methylpseudouracil
  modified_base 1640: mod_base = OTHER; note = N1-methylpseudouracil
  modified_base 1648: mod_base = OTHER; note = N1-methylpseudouracil
  modified_base 1655: mod_base = OTHER; note = N1-methylpseudouracil
  modified_base 1667: mod_base = OTHER; note = N1-methylpseudouracil
  modified_base 1669: mod_base = OTHER; note = N1-methylpseudouracil
  modified_base 1675: mod_base = OTHER; note = N1-methylpseudouracil
  modified_base 1676: mod_base = OTHER; note = N1-methylpseudouracil
  modified_base 1677: mod_base = OTHER; note = N1-methylpseudouracil
  modified_base 1694: mod_base = OTHER; note = N1-methylpseudouracil
  modified_base 1695: mod_base = OTHER; note = N1-methylpseudouracil
  modified_base 1697: mod_base = OTHER; note = N1-methylpseudouracil
  modified_base 1700: mod_base = OTHER; note = N1-methylpseudouracil
  modified_base 1715: mod_base = OTHER; note = N1-methylpseudouracil
  modified_base 1721: mod_base = OTHER; note = N1-methylpseudouracil
  modified_base 1723: mod_base = OTHER; note = N1-methylpseudouracil
  modified_base 1728: mod_base = OTHER; note = N1-methylpseudouracil
  modified_base 1737: mod_base = OTHER; note = N1-methylpseudouracil
  modified_base 1745: mod_base = OTHER; note = N1-methylpseudouracil
  modified_base 1747: mod_base = OTHER; note = N1-methylpseudouracil
  modified_base 1751: mod_base = OTHER; note = N1-methylpseudouracil
  modified_base 1761: mod_base = OTHER; note = N1-methylpseudouracil
  modified_base 1763: mod_base = OTHER; note = N1-methylpseudouracil
  modified_base 1765: mod_base = OTHER; note = N1-methylpseudouracil
  modified_base 1781: mod_base = OTHER; note = N1-methylpseudouracil
  modified_base 1783: mod_base = OTHER; note = N1-methylpseudouracil
  modified_base 1787: mod_base = OTHER; note = N1-methylpseudouracil
  modified_base 1790: mod_base = OTHER; note = N1-methylpseudouracil
  modified_base 1800: mod_base = OTHER; note = N1-methylpseudouracil
  modified_base 1801: mod_base = OTHER; note = N1-methylpseudouracil
  modified_base 1802: mod_base = OTHER; note = N1-methylpseudouracil
  modified_base 1803: mod_base = OTHER; note = N1-methylpseudouracil
  modified_base 1807: mod_base = OTHER; note = N1-methylpseudouracil
  modified_base 1811: mod_base = OTHER; note = N1-methylpseudouracil
  modified_base 1817: mod_base = OTHER; note = N1-methylpseudouracil
  modified_base 1820: mod_base = OTHER; note = N1-methylpseudouracil
  modified_base 1835: mod_base = OTHER; note = N1-methylpseudouracil
  modified_base 1837: mod_base = OTHER; note = N1-methylpseudouracil
  modified_base 1838: mod_base = OTHER; note = N1-methylpseudouracil
  modified_base 1843: mod_base = OTHER; note = N1-methylpseudouracil
  modified_base 1846: mod_base = OTHER; note = N1-methylpseudouracil
  modified_base 1850: mod_base = OTHER; note = N1-methylpseudouracil
  modified_base 1852: mod_base = OTHER; note = N1-methylpseudouracil
  modified_base 1854: mod_base = OTHER; note = N1-methylpseudouracil
  modified_base 1859: mod_base = OTHER; note = N1-methylpseudouracil
  modified_base 1862: mod_base = OTHER; note = N1-methylpseudouracil
  modified_base 1880: mod_base = OTHER; note = N1-methylpseudouracil
  modified_base 1883: mod_base = OTHER; note = N1-methylpseudouracil
  modified_base 1886: mod_base = OTHER; note = N1-methylpseudouracil
  modified_base 1898: mod_base = OTHER; note = N1-methylpseudouracil
  modified_base 1905: mod_base = OTHER; note = N1-methylpseudouracil
  modified_base 1907: mod_base = OTHER; note = N1-methylpseudouracil
  modified_base 1925: mod_base = OTHER; note = N1-methylpseudouracil
  modified_base 1928: mod_base = OTHER; note = N1-methylpseudouracil
  modified_base 1931: mod_base = OTHER; note = N1-methylpseudouracil
  modified_base 1934: mod_base = OTHER; note = N1-methylpseudouracil
  modified_base 1945: mod_base = OTHER; note = N1-methylpseudouracil
  modified_base 1951: mod_base = OTHER; note = N1-methylpseudouracil
  modified_base 1954: mod_base = OTHER; note = N1-methylpseudouracil
  modified_base 1955: mod_base = OTHER; note = N1-methylpseudouracil
  modified_base 1957: mod_base = OTHER; note = N1-methylpseudouracil
  modified_base 1966: mod_base = OTHER; note = N1-methylpseudouracil
  modified_base 1967: mod_base = OTHER; note = N1-methylpseudouracil
  modified_base 1976: mod_base = OTHER; note = N1-methylpseudouracil
  modified_base 1985: mod_base = OTHER; note = N1-methylpseudouracil
  modified_base 1996: mod_base = OTHER; note = N1-methylpseudouracil
  modified_base 1997: mod_base = OTHER; note = N1-methylpseudouracil
  modified_base 2002: mod_base = OTHER; note = N1-methylpseudouracil
  modified_base 2009: mod_base = OTHER; note = N1-methylpseudouracil
  modified_base 2012: mod_base = OTHER; note = N1-methylpseudouracil
  modified_base 2017: mod_base = OTHER; note = N1-methylpseudouracil
  modified_base 2022: mod_base = OTHER; note = N1-methylpseudouracil
  modified_base 2026: mod_base = OTHER; note = N1-methylpseudouracil
  modified_base 2027: mod_base = OTHER; note = N1-methylpseudouracil
  modified_base 2035: mod_base = OTHER; note = N1-methylpseudouracil
  modified_base 2036: mod_base = OTHER; note = N1-methylpseudouracil
  modified_base 2038: mod_base = OTHER; note = N1-methylpseudouracil
  modified_base 2056: mod_base = OTHER; note = N1-methylpseudouracil
  modified_base 2060: mod_base = OTHER; note = N1-methylpseudouracil
  modified_base 2061: mod_base = OTHER; note = N1-methylpseudouracil
  modified_base 2063: mod_base = OTHER; note = N1-methylpseudouracil
  modified_base 2075: mod_base = OTHER; note = N1-methylpseudouracil
  modified_base 2083: mod_base = OTHER; note = N1-methylpseudouracil
  modified_base 2084: mod_base = OTHER; note = N1-methylpseudouracil
  modified_base 2086: mod_base = OTHER; note = N1-methylpseudouracil
  modified_base 2090: mod_base = OTHER; note = N1-methylpseudouracil
  modified_base 2108: mod_base = OTHER; note = N1-methylpseudouracil
  modified_base 2113: mod_base = OTHER; note = N1-methylpseudouracil
  modified_base 2137: mod_base = OTHER; note = N1-methylpseudouracil
  modified_base 2138: mod_base = OTHER; note = N1-methylpseudouracil
  modified_base 2155: mod_base = OTHER; note = N1-methylpseudouracil
  modified_base 2156: mod_base = OTHER; note = N1-methylpseudouracil
  modified_base 2176: mod_base = OTHER; note = N1-methylpseudouracil
  modified_base 2180: mod_base = OTHER; note = N1-methylpseudouracil
  modified_base 2183: mod_base = OTHER; note = N1-methylpseudouracil
  modified_base 2192: mod_base = OTHER; note = N1-methylpseudouracil
  modified_base 2201: mod_base = OTHER; note = N1-methylpseudouracil
  modified_base 2209: mod_base = OTHER; note = N1-methylpseudouracil
  modified_base 2210: mod_base = OTHER; note = N1-methylpseudouracil
  modified_base 2216: mod_base = OTHER; note = N1-methylpseudouracil
  modified_base 2219: mod_base = OTHER; note = N1-methylpseudouracil
  modified_base 2232: mod_base = OTHER; note = N1-methylpseudouracil
  modified_base 2234: mod_base = OTHER; note = N1-methylpseudouracil
  modified_base 2240: mod_base = OTHER; note = N1-methylpseudouracil
  modified_base 2249: mod_base = OTHER; note = N1-methylpseudouracil
  modified_base 2273: mod_base = OTHER; note = N1-methylpseudouracil
  modified_base 2285: mod_base = OTHER; note = N1-methylpseudouracil
  modified_base 2287: mod_base = OTHER; note = N1-methylpseudouracil
  modified_base 2291: mod_base = OTHER; note = N1-methylpseudouracil
  modified_base 2294: mod_base = OTHER; note = N1-methylpseudouracil
  modified_base 2321: mod_base = OTHER; note = N1-methylpseudouracil
  modified_base 2324: mod_base = OTHER; note = N1-methylpseudouracil
  modified_base 2333: mod_base = OTHER; note = N1-methylpseudouracil
  modified_base 2335: mod_base = OTHER; note = N1-methylpseudouracil
  modified_base 2339: mod_base = OTHER; note = N1-methylpseudouracil
  modified_base 2342: mod_base = OTHER; note = N1-methylpseudouracil
  modified_base 2344: mod_base = OTHER; note = N1-methylpseudouracil
  modified_base 2349: mod_base = OTHER; note = N1-methylpseudouracil
  modified_base 2360: mod_base = OTHER; note = N1-methylpseudouracil
  modified_base 2384: mod_base = OTHER; note = N1-methylpseudouracil
  modified_base 2387: mod_base = OTHER; note = N1-methylpseudouracil
  modified_base 2393: mod_base = OTHER; note = N1-methylpseudouracil
  modified_base 2396: mod_base = OTHER; note = N1-methylpseudouracil
  modified_base 2408: mod_base = OTHER; note = N1-methylpseudouracil
  modified_base 2424: mod_base = OTHER; note = N1-methylpseudouracil
  modified_base 2426: mod_base = OTHER; note = N1-methylpseudouracil
  modified_base 2439: mod_base = OTHER; note = N1-methylpseudouracil
  modified_base 2459: mod_base = OTHER; note = N1-methylpseudouracil
  modified_base 2465: mod_base = OTHER; note = N1-methylpseudouracil
  modified_base 2469: mod_base = OTHER; note = N1-methylpseudouracil
  modified_base 2483: mod_base = OTHER; note = N1-methylpseudouracil
  modified_base 2492: mod_base = OTHER; note = N1-methylpseudouracil
  modified_base 2498: mod_base = OTHER; note = N1-methylpseudouracil
  modified_base 2500: mod_base = OTHER; note = N1-methylpseudouracil
  modified_base 2513: mod_base = OTHER; note = N1-methylpseudouracil
  modified_base 2531: mod_base = OTHER; note = N1-methylpseudouracil
  modified_base 2537: mod_base = OTHER; note = N1-methylpseudouracil
  modified_base 2549: mod_base = OTHER; note = N1-methylpseudouracil
  modified_base 2564: mod_base = OTHER; note = N1-methylpseudouracil
  modified_base 2572: mod_base = OTHER; note = N1-methylpseudouracil
  modified_base 2575: mod_base = OTHER; note = N1-methylpseudouracil
  modified_base 2576: mod_base = OTHER; note = N1-methylpseudouracil
  modified_base 2578: mod_base = OTHER; note = N1-methylpseudouracil
  modified_base 2579: mod_base = OTHER; note = N1-methylpseudouracil
  modified_base 2588: mod_base = OTHER; note = N1-methylpseudouracil
  modified_base 2593: mod_base = OTHER; note = N1-methylpseudouracil
  modified_base 2597: mod_base = OTHER; note = N1-methylpseudouracil
  modified_base 2606: mod_base = OTHER; note = N1-methylpseudouracil
  modified_base 2614: mod_base = OTHER; note = N1-methylpseudouracil
  modified_base 2623: mod_base = OTHER; note = N1-methylpseudouracil
  modified_base 2627: mod_base = OTHER; note = N1-methylpseudouracil
  modified_base 2632: mod_base = OTHER; note = N1-methylpseudouracil
  modified_base 2636: mod_base = OTHER; note = N1-methylpseudouracil
  modified_base 2642: mod_base = OTHER; note = N1-methylpseudouracil
  modified_base 2654: mod_base = OTHER; note = N1-methylpseudouracil
  modified_base 2657: mod_base = OTHER; note = N1-methylpseudouracil
  modified_base 2659: mod_base = OTHER; note = N1-methylpseudouracil
  modified_base 2660: mod_base = OTHER; note = N1-methylpseudouracil
  modified_base 2663: mod_base = OTHER; note = N1-methylpseudouracil
  modified_base 2666: mod_base = OTHER; note = N1-methylpseudouracil
  modified_base 2669: mod_base = OTHER; note = N1-methylpseudouracil
  modified_base 2671: mod_base = OTHER; note = N1-methylpseudouracil
  modified_base 2674: mod_base = OTHER; note = N1-methylpseudouracil
  modified_base 2678: mod_base = OTHER; note = N1-methylpseudouracil
  modified_base 2681: mod_base = OTHER; note = N1-methylpseudouracil
  modified_base 2684: mod_base = OTHER; note = N1-methylpseudouracil
  modified_base 2686: mod_base = OTHER; note = N1-methylpseudouracil
  modified_base 2687: mod_base = OTHER; note = N1-methylpseudouracil
  modified_base 2689: mod_base = OTHER; note = N1-methylpseudouracil
  modified_base 2690: mod_base = OTHER; note = N1-methylpseudouracil
  modified_base 2699: mod_base = OTHER; note = N1-methylpseudouracil
  modified_base 2707: mod_base = OTHER; note = N1-methylpseudouracil
  modified_base 2711: mod_base = OTHER; note = N1-methylpseudouracil
  modified_base 2714: mod_base = OTHER; note = N1-methylpseudouracil
  modified_base 2717: mod_base = OTHER; note = N1-methylpseudouracil
  modified_base 2720: mod_base = OTHER; note = N1-methylpseudouracil
  modified_base 2722: mod_base = OTHER; note = N1-methylpseudouracil
  modified_base 2726: mod_base = OTHER; note = N1-methylpseudouracil
  modified_base 2729: mod_base = OTHER; note = N1-methylpseudouracil
  modified_base 2736: mod_base = OTHER; note = N1-methylpseudouracil
  modified_base 2744: mod_base = OTHER; note = N1-methylpseudouracil
  modified_base 2761: mod_base = OTHER; note = N1-methylpseudouracil
  modified_base 2785: mod_base = OTHER; note = N1-methylpseudouracil
  modified_base 2792: mod_base = OTHER; note = N1-methylpseudouracil
  modified_base 2795: mod_base = OTHER; note = N1-methylpseudouracil
  modified_base 2798: mod_base = OTHER; note = N1-methylpseudouracil
  modified_base 2803: mod_base = OTHER; note = N1-methylpseudouracil
  modified_base 2815: mod_base = OTHER; note = N1-methylpseudouracil
  modified_base 2818: mod_base = OTHER; note = N1-methylpseudouracil
  modified_base 2822: mod_base = OTHER; note = N1-methylpseudouracil
  modified_base 2824: mod_base = OTHER; note = N1-methylpseudouracil
  modified_base 2825: mod_base = OTHER; note = N1-methylpseudouracil
  modified_base 2827: mod_base = OTHER; note = N1-methylpseudouracil
  modified_base 2831: mod_base = OTHER; note = N1-methylpseudouracil
  modified_base 2833: mod_base = OTHER; note = N1-methylpseudouracil
  modified_base 2837: mod_base = OTHER; note = N1-methylpseudouracil
  modified_base 2843: mod_base = OTHER; note = N1-methylpseudouracil
  modified_base 2855: mod_base = OTHER; note = N1-methylpseudouracil
  modified_base 2858: mod_base = OTHER; note = N1-methylpseudouracil
  modified_base 2864: mod_base = OTHER; note = N1-methylpseudouracil
  modified_base 2869: mod_base = OTHER; note = N1-methylpseudouracil
  modified_base 2870: mod_base = OTHER; note = N1-methylpseudouracil
  modified_base 2872: mod_base = OTHER; note = N1-methylpseudouracil
  modified_base 2873: mod_base = OTHER; note = N1-methylpseudouracil
  modified_base 2882: mod_base = OTHER; note = N1-methylpseudouracil
  modified_base 2886: mod_base = OTHER; note = N1-methylpseudouracil
  modified_base 2888: mod_base = OTHER; note = N1-methylpseudouracil
  modified_base 2891: mod_base = OTHER; note = N1-methylpseudouracil
  modified_base 2900: mod_base = OTHER; note = N1-methylpseudouracil
  modified_base 2903: mod_base = OTHER; note = N1-methylpseudouracil
  modified_base 2909: mod_base = OTHER; note = N1-methylpseudouracil
  modified_base 2918: mod_base = OTHER; note = N1-methylpseudouracil
  modified_base 2921: mod_base = OTHER; note = N1-methylpseudouracil
  modified_base 2933: mod_base = OTHER; note = N1-methylpseudouracil
  modified_base 2936: mod_base = OTHER; note = N1-methylpseudouracil
  modified_base 2945: mod_base = OTHER; note = N1-methylpseudouracil
  modified_base 2948: mod_base = OTHER; note = N1-methylpseudouracil
  modified_base 2955: mod_base = OTHER; note = N1-methylpseudouracil
  modified_base 2960: mod_base = OTHER; note = N1-methylpseudouracil
  modified_base 2962: mod_base = OTHER; note = N1-methylpseudouracil
  modified_base 2969: mod_base = OTHER; note = N1-methylpseudouracil
  modified_base 2978: mod_base = OTHER; note = N1-methylpseudouracil
  modified_base 2993: mod_base = OTHER; note = N1-methylpseudouracil
  modified_base 2996: mod_base = OTHER; note = N1-methylpseudouracil
  modified_base 3004: mod_base = OTHER; note = N1-methylpseudouracil
  modified_base 3005: mod_base = OTHER; note = N1-methylpseudouracil
  modified_base 3017: mod_base = OTHER; note = N1-methylpseudouracil
  modified_base 3023: mod_base = OTHER; note = N1-methylpseudouracil
  modified_base 3024: mod_base = OTHER; note = N1-methylpseudouracil
  modified_base 3026: mod_base = OTHER; note = N1-methylpseudouracil
  modified_base 3033: mod_base = OTHER; note = N1-methylpseudouracil
  modified_base 3035: mod_base = OTHER; note = N1-methylpseudouracil
  modified_base 3038: mod_base = OTHER; note = N1-methylpseudouracil
  modified_base 3044: mod_base = OTHER; note = N1-methylpseudouracil
  modified_base 3050: mod_base = OTHER; note = N1-methylpseudouracil
  modified_base 3052: mod_base = OTHER; note = N1-methylpseudouracil
  modified_base 3053: mod_base = OTHER; note = N1-methylpseudouracil
  modified_base 3058: mod_base = OTHER; note = N1-methylpseudouracil
  modified_base 3059: mod_base = OTHER; note = N1-methylpseudouracil
  modified_base 3062: mod_base = OTHER; note = N1-methylpseudouracil
  modified_base 3068: mod_base = OTHER; note = N1-methylpseudouracil
  modified_base 3071: mod_base = OTHER; note = N1-methylpseudouracil
  modified_base 3074: mod_base = OTHER; note = N1-methylpseudouracil
  modified_base 3077: mod_base = OTHER; note = N1-methylpseudouracil
  modified_base 3080: mod_base = OTHER; note = N1-methylpseudouracil
  modified_base 3083: mod_base = OTHER; note = N1-methylpseudouracil
  modified_base 3092: mod_base = OTHER; note = N1-methylpseudouracil
  modified_base 3098: mod_base = OTHER; note = N1-methylpseudouracil
  modified_base 3101: mod_base = OTHER; note = N1-methylpseudouracil
  modified_base 3107: mod_base = OTHER; note = N1-methylpseudouracil
  modified_base 3110: mod_base = OTHER; note = N1-methylpseudouracil
  modified_base 3118: mod_base = OTHER; note = N1-methylpseudouracil
  modified_base 3122: mod_base = OTHER; note = N1-methylpseudouracil
  modified_base 3124: mod_base = OTHER; note = N1-methylpseudouracil
  modified_base 3125: mod_base = OTHER; note = N1-methylpseudouracil
  modified_base 3128: mod_base = OTHER; note = N1-methylpseudouracil
  modified_base 3137: mod_base = OTHER; note = N1-methylpseudouracil
  modified_base 3143: mod_base = OTHER; note = N1-methylpseudouracil
  modified_base 3146: mod_base = OTHER; note = N1-methylpseudouracil
  modified_base 3149: mod_base = OTHER; note = N1-methylpseudouracil
  modified_base 3154: mod_base = OTHER; note = N1-methylpseudouracil
  modified_base 3155: mod_base = OTHER; note = N1-methylpseudouracil
  modified_base 3158: mod_base = OTHER; note = N1-methylpseudouracil
  modified_base 3161: mod_base = OTHER; note = N1-methylpseudouracil
  modified_base 3164: mod_base = OTHER; note = N1-methylpseudouracil
  modified_base 3172: mod_base = OTHER; note = N1-methylpseudouracil
  modified_base 3175: mod_base = OTHER; note = N1-methylpseudouracil
  modified_base 3176: mod_base = OTHER; note = N1-methylpseudouracil
  modified_base 3179: mod_base = OTHER; note = N1-methylpseudouracil
  modified_base 3187: mod_base = OTHER; note = N1-methylpseudouracil
  modified_base 3197: mod_base = OTHER; note = N1-methylpseudouracil
  modified_base 3206: mod_base = OTHER; note = N1-methylpseudouracil
  modified_base 3230: mod_base = OTHER; note = N1-methylpseudouracil
  modified_base 3232: mod_base = OTHER; note = N1-methylpseudouracil
  modified_base 3233: mod_base = OTHER; note = N1-methylpseudouracil
  modified_base 3242: mod_base = OTHER; note = N1-methylpseudouracil
  modified_base 3245: mod_base = OTHER; note = N1-methylpseudouracil
  modified_base 3249: mod_base = OTHER; note = N1-methylpseudouracil
  modified_base 3254: mod_base = OTHER; note = N1-methylpseudouracil
  modified_base 3263: mod_base = OTHER; note = N1-methylpseudouracil
  modified_base 3265: mod_base = OTHER; note = N1-methylpseudouracil
  modified_base 3272: mod_base = OTHER; note = N1-methylpseudouracil
  modified_base 3280: mod_base = OTHER; note = N1-methylpseudouracil
  modified_base 3281: mod_base = OTHER; note = N1-methylpseudouracil
  modified_base 3295: mod_base = OTHER; note = N1-methylpseudouracil
  modified_base 3298: mod_base = OTHER; note = N1-methylpseudouracil
  modified_base 3299: mod_base = OTHER; note = N1-methylpseudouracil
  modified_base 3308: mod_base = OTHER; note = N1-methylpseudouracil
  modified_base 3310: mod_base = OTHER; note = N1-methylpseudouracil
  modified_base 3311: mod_base = OTHER; note = N1-methylpseudouracil
  modified_base 3321: mod_base = OTHER; note = N1-methylpseudouracil
  modified_base 3323: mod_base = OTHER; note = N1-methylpseudouracil
  modified_base 3329: mod_base = OTHER; note = N1-methylpseudouracil
  modified_base 3343: mod_base = OTHER; note = N1-methylpseudouracil
  modified_base 3346: mod_base = OTHER; note = N1-methylpseudouracil
  modified_base 3347: mod_base = OTHER; note = N1-methylpseudouracil
  modified_base 3350: mod_base = OTHER; note = N1-methylpseudouracil
  modified_base 3352: mod_base = OTHER; note = N1-methylpseudouracil
  modified_base 3356: mod_base = OTHER; note = N1-methylpseudouracil
  modified_base 3365: mod_base = OTHER; note = N1-methylpseudouracil
  modified_base 3370: mod_base = OTHER; note = N1-methylpseudouracil
  modified_base 3373: mod_base = OTHER; note = N1-methylpseudouracil
  modified_base 3374: mod_base = OTHER; note = N1-methylpseudouracil
  modified_base 3380: mod_base = OTHER; note = N1-methylpseudouracil
  modified_base 3386: mod_base = OTHER; note = N1-methylpseudouracil
  modified_base 3392: mod_base = OTHER; note = N1-methylpseudouracil
  modified_base 3395: mod_base = OTHER; note = N1-methylpseudouracil
  modified_base 3397: mod_base = OTHER; note = N1-methylpseudouracil
  modified_base 3398: mod_base = OTHER; note = N1-methylpseudouracil
  modified_base 3401: mod_base = OTHER; note = N1-methylpseudouracil
  modified_base 3404: mod_base = OTHER; note = N1-methylpseudouracil
  modified_base 3406: mod_base = OTHER; note = N1-methylpseudouracil
  modified_base 3407: mod_base = OTHER; note = N1-methylpseudouracil
  modified_base 3409: mod_base = OTHER; note = N1-methylpseudouracil
  modified_base 3410: mod_base = OTHER; note = N1-methylpseudouracil
  modified_base 3413: mod_base = OTHER; note = N1-methylpseudouracil
  modified_base 3419: mod_base = OTHER; note = N1-methylpseudouracil
  modified_base 3424: mod_base = OTHER; note = N1-methylpseudouracil
  modified_base 3425: mod_base = OTHER; note = N1-methylpseudouracil
  modified_base 3428: mod_base = OTHER; note = N1-methylpseudouracil
  modified_base 3430: mod_base = OTHER; note = N1-methylpseudouracil
  modified_base 3434: mod_base = OTHER; note = N1-methylpseudouracil
  modified_base 3437: mod_base = OTHER; note = N1-methylpseudouracil
  modified_base 3464: mod_base = OTHER; note = N1-methylpseudouracil
  modified_base 3470: mod_base = OTHER; note = N1-methylpseudouracil
  modified_base 3473: mod_base = OTHER; note = N1-methylpseudouracil
  modified_base 3476: mod_base = OTHER; note = N1-methylpseudouracil
  modified_base 3482: mod_base = OTHER; note = N1-methylpseudouracil
  modified_base 3488: mod_base = OTHER; note = N1-methylpseudouracil
  modified_base 3492: mod_base = OTHER; note = N1-methylpseudouracil
  modified_base 3494: mod_base = OTHER; note = N1-methylpseudouracil
  modified_base 3497: mod_base = OTHER; note = N1-methylpseudouracil
  modified_base 3506: mod_base = OTHER; note = N1-methylpseudouracil
  modified_base 3511: mod_base = OTHER; note = N1-methylpseudouracil
  modified_base 3518: mod_base = OTHER; note = N1-methylpseudouracil
  modified_base 3530: mod_base = OTHER; note = N1-methylpseudouracil
  modified_base 3536: mod_base = OTHER; note = N1-methylpseudouracil
  modified_base 3545: mod_base = OTHER; note = N1-methylpseudouracil
  modified_base 3548: mod_base = OTHER; note = N1-methylpseudouracil
  modified_base 3553: mod_base = OTHER; note = N1-methylpseudouracil
  modified_base 3557: mod_base = OTHER; note = N1-methylpseudouracil
  modified_base 3559: mod_base = OTHER; note = N1-methylpseudouracil
  modified_base 3566: mod_base = OTHER; note = N1-methylpseudouracil
  modified_base 3568: mod_base = OTHER; note = N1-methylpseudouracil
  modified_base 3569: mod_base = OTHER; note = N1-methylpseudouracil
  modified_base 3574: mod_base = OTHER; note = N1-methylpseudouracil
  modified_base 3575: mod_base = OTHER; note = N1-methylpseudouracil
  modified_base 3578: mod_base = OTHER; note = N1-methylpseudouracil
  modified_base 3584: mod_base = OTHER; note = N1-methylpseudouracil
  modified_base 3622: mod_base = OTHER; note = N1-methylpseudouracil
  modified_base 3638: mod_base = OTHER; note = N1-methylpseudouracil
  modified_base 3647: mod_base = OTHER; note = N1-methylpseudouracil
  modified_base 3650: mod_base = OTHER; note = N1-methylpseudouracil
  modified_base 3653: mod_base = OTHER; note = N1-methylpseudouracil
  modified_base 3654: mod_base = OTHER; note = N1-methylpseudouracil
  modified_base 3656: mod_base = OTHER; note = N1-methylpseudouracil
  modified_base 3671: mod_base = OTHER; note = N1-methylpseudouracil
  modified_base 3686: mod_base = OTHER; note = N1-methylpseudouracil
  modified_base 3688: mod_base = OTHER; note = N1-methylpseudouracil
  modified_base 3693: mod_base = OTHER; note = N1-methylpseudouracil
  modified_base 3694: mod_base = OTHER; note = N1-methylpseudouracil
  modified_base 3707: mod_base = OTHER; note = N1-methylpseudouracil
  modified_base 3713: mod_base = OTHER; note = N1-methylpseudouracil
  modified_base 3722: mod_base = OTHER; note = N1-methylpseudouracil
  modified_base 3733: mod_base = OTHER; note = N1-methylpseudouracil
  modified_base 3755: mod_base = OTHER; note = N1-methylpseudouracil
  modified_base 3758: mod_base = OTHER; note = N1-methylpseudouracil
  modified_base 3767: mod_base = OTHER; note = N1-methylpseudouracil
  modified_base 3772: mod_base = OTHER; note = N1-methylpseudouracil
  modified_base 3773: mod_base = OTHER; note = N1-methylpseudouracil
  modified_base 3775: mod_base = OTHER; note = N1-methylpseudouracil
  modified_base 3779: mod_base = OTHER; note = N1-methylpseudouracil
  modified_base 3780: mod_base = OTHER; note = N1-methylpseudouracil
  modified_base 3786: mod_base = OTHER; note = N1-methylpseudouracil
  modified_base 3797: mod_base = OTHER; note = N1-methylpseudouracil
  modified_base 3803: mod_base = OTHER; note = N1-methylpseudouracil
  modified_base 3805: mod_base = OTHER; note = N1-methylpseudouracil
  modified_base 3806: mod_base = OTHER; note = N1-methylpseudouracil
  modified_base 3822: mod_base = OTHER; note = N1-methylpseudouracil
  modified_base 3836: mod_base = OTHER; note = N1-methylpseudouracil
  modified_base 3839: mod_base = OTHER; note = N1-methylpseudouracil
  modified_base 3841: mod_base = OTHER; note = N1-methylpseudouracil
  modified_base 3847: mod_base = OTHER; note = N1-methylpseudouracil
  modified_base 3848: mod_base = OTHER; note = N1-methylpseudouracil
  modified_base 3851: mod_base = OTHER; note = N1-methylpseudouracil
  modified_base 3857: mod_base = OTHER; note = N1-methylpseudouracil
  modified_base 3860: mod_base = OTHER; note = N1-methylpseudouracil
  modified_base 3878: mod_base = OTHER; note = N1-methylpseudouracil
  modified_base 3884: mod_base = OTHER; note = N1-methylpseudouracil
  modified_base 3893: mod_base = OTHER; note = N1-methylpseudouracil
  modified_base 3898: mod_base = OTHER; note = N1-methylpseudouracil
  modified_base 3908: mod_base = OTHER; note = N1-methylpseudouracil
  modified_base 3914: mod_base = OTHER; note = N1-methylpseudouracil
  modified_base 3922: mod_base = OTHER; note = N1-methylpseudouracil
  modified_base 3934: mod_base = OTHER; note = N1-methylpseudouracil
  modified_base 3935: mod_base = OTHER; note = N1-methylpseudouracil
  modified_base 3941: mod_base = OTHER; note = N1-methylpseudouracil
  modified_base 3944: mod_base = OTHER; note = N1-methylpseudouracil
  modified_base 3956: mod_base = OTHER; note = N1-methylpseudouracil
  modified_base 3958: mod_base = OTHER; note = N1-methylpseudouracil
  modified_base 3959: mod_base = OTHER; note = N1-methylpseudouracil
  modified_base 3960: mod_base = OTHER; note = N1-methylpseudouracil
  modified_base 3962: mod_base = OTHER; note = N1-methylpseudouracil
  modified_base 3963: mod_base = OTHER; note = N1-methylpseudouracil
  modified_base 3964: mod_base = OTHER; note = N1-methylpseudouracil
  modified_base 3965: mod_base = OTHER; note = N1-methylpseudouracil
  modified_base 3967: mod_base = OTHER; note = N1-methylpseudouracil
  modified_base 3969: mod_base = OTHER; note = N1-methylpseudouracil
  modified_base 3976: mod_base = OTHER; note = N1-methylpseudouracil
  modified_base 3977: mod_base = OTHER; note = N1-methylpseudouracil
  modified_base 3978: mod_base = OTHER; note = N1-methylpseudouracil
  modified_base 3989: mod_base = OTHER; note = N1-methylpseudouracil
  modified_base 3997: mod_base = OTHER; note = N1-methylpseudouracil
  modified_base 4006: mod_base = OTHER; note = N1-methylpseudouracil
  modified_base 4009: mod_base = OTHER; note = N1-methylpseudouracil
  modified_base 4022: mod_base = OTHER; note = N1-methylpseudouracil
  modified_base 4024: mod_base = OTHER; note = N1-methylpseudouracil
  modified_base 4031: mod_base = OTHER; note = N1-methylpseudouracil
  modified_base 4043: mod_base = OTHER; note = N1-methylpseudouracil
  modified_base 4049: mod_base = OTHER; note = N1-methylpseudouracil
  modified_base 4054: mod_base = OTHER; note = N1-methylpseudouracil
  modified_base 4058: mod_base = OTHER; note = N1-methylpseudouracil
  modified_base 4061: mod_base = OTHER; note = N1-methylpseudouracil
  modified_base 4069: mod_base = OTHER; note = N1-methylpseudouracil
  modified_base 4070: mod_base = OTHER; note = N1-methylpseudouracil
  modified_base 4082: mod_base = OTHER; note = N1-methylpseudouracil
  modified_base 4087: mod_base = OTHER; note = N1-methylpseudouracil
  modified_base 4088: mod_base = OTHER; note = N1-methylpseudouracil
  modified_base 4091: mod_base = OTHER; note = N1-methylpseudouracil
  modified_base 4094: mod_base = OTHER; note = N1-methylpseudouracil
  modified_base 4097: mod_base = OTHER; note = N1-methylpseudouracil
  modified_base 4108: mod_base = OTHER; note = N1-methylpseudouracil
  modified_base 4112: mod_base = OTHER; note = N1-methylpseudouracil
  modified_base 4115: mod_base = OTHER; note = N1-methylpseudouracil
  modified_base 4136: mod_base = OTHER; note = N1-methylpseudouracil
  modified_base 4139: mod_base = OTHER; note = N1-methylpseudouracil
  modified_base 4141: mod_base = OTHER; note = N1-methylpseudouracil
  modified_base 4145: mod_base = OTHER; note = N1-methylpseudouracil
  modified_base 4157: mod_base = OTHER; note = N1-methylpseudouracil
  modified_base 4160: mod_base = OTHER; note = N1-methylpseudouracil
  modified_base 4175: mod_base = OTHER; note = N1-methylpseudouracil
  modified_base 4178: mod_base = OTHER; note = N1-methylpseudouracil
  modified_base 4181: mod_base = OTHER; note = N1-methylpseudouracil
  modified_base 4184: mod_base = OTHER; note = N1-methylpseudouracil
  modified_base 4195: mod_base = OTHER; note = N1-methylpseudouracil
  modified_base 4205: mod_base = OTHER; note = N1-methylpseudouracil
  modified_base 4209: mod_base = OTHER; note = N1-methylpseudouracil
  modified_base 4214: mod_base = OTHER; note = N1-methylpseudouracil
  modified_base 4219: mod_base = OTHER; note = N1-methylpseudouracil
  modified_base 4226: mod_base = OTHER; note = N1-methylpseudouracil
  modified_base 4229: mod_base = OTHER; note = N1-methylpseudouracil
  modified_base 4241: mod_base = OTHER; note = N1-methylpseudouracil
  modified_base 4252: mod_base = OTHER; note = N1-methylpseudouracil
  modified_base 4253: mod_base = OTHER; note = N1-methylpseudouracil
  modified_base 4261: mod_base = OTHER; note = N1-methylpseudouracil
  modified_base 4268: mod_base = OTHER; note = N1-methylpseudouracil
  modified_base 4271: mod_base = OTHER; note = N1-methylpseudouracil
  modified_base 4274: mod_base = OTHER; note = N1-methylpseudouracil
  modified_base 4276: mod_base = OTHER; note = N1-methylpseudouracil
  modified_base 4289: mod_base = OTHER; note = N1-methylpseudouracil
  modified_base 4296: mod_base = OTHER; note = N1-methylpseudouracil
  modified_base 4298: mod_base = OTHER; note = N1-methylpseudouracil
  modified_base 4301: mod_base = OTHER; note = N1-methylpseudouracil
  modified_base 4306: mod_base = OTHER; note = N1-methylpseudouracil
  modified_base 4315: mod_base = OTHER; note = N1-methylpseudouracil
  modified_base 4316: mod_base = OTHER; note = N1-methylpseudouracil
  modified_base 4319: mod_base = OTHER; note = N1-methylpseudouracil
  modified_base 4322: mod_base = OTHER; note = N1-methylpseudouracil
  modified_base 4325: mod_base = OTHER; note = N1-methylpseudouracil
  modified_base 4340: mod_base = OTHER; note = N1-methylpseudouracil
  modified_base 4348: mod_base = OTHER; note = N1-methylpseudouracil
  modified_base 4354: mod_base = OTHER; note = N1-methylpseudouracil
  modified_base 4358: mod_base = OTHER; note = N1-methylpseudouracil
  modified_base 4367: mod_base = OTHER; note = N1-methylpseudouracil
  modified_base 4370: mod_base = OTHER; note = N1-methylpseudouracil
  modified_base 4385: mod_base = OTHER; note = N1-methylpseudouracil
  modified_base 4387: mod_base = OTHER; note = N1-methylpseudouracil
  modified_base 4388: mod_base = OTHER; note = N1-methylpseudouracil
  modified_base 4398: mod_base = OTHER; note = N1-methylpseudouracil
  modified_base 4400: mod_base = OTHER; note = N1-methylpseudouracil
  modified_base 4402: mod_base = OTHER; note = N1-methylpseudouracil
  modified_base 4404: mod_base = OTHER; note = N1-methylpseudouracil
  modified_base 4413: mod_base = OTHER; note = N1-methylpseudouracil
  modified_base 4418: mod_base = OTHER; note = N1-methylpseudouracil
  modified_base 4424: mod_base = OTHER; note = N1-methylpseudouracil
  modified_base 4426: mod_base = OTHER; note = N1-methylpseudouracil
  modified_base 4427: mod_base = OTHER; note = N1-methylpseudouracil
  modified_base 4431: mod_base = OTHER; note = N1-methylpseudouracil
  modified_base 4450: mod_base = OTHER; note = N1-methylpseudouracil
  modified_base 4456: mod_base = OTHER; note = N1-methylpseudouracil
  modified_base 4458: mod_base = OTHER; note = N1-methylpseudouracil
  modified_base 4469: mod_base = OTHER; note = N1-methylpseudouracil
  modified_base 4478: mod_base = OTHER; note = N1-methylpseudouracil
  modified_base 4502: mod_base = OTHER; note = N1-methylpseudouracil
  modified_base 4509: mod_base = OTHER; note = N1-methylpseudouracil
  modified_base 4517: mod_base = OTHER; note = N1-methylpseudouracil
  modified_base 4519: mod_base = OTHER; note = N1-methylpseudouracil
  modified_base 4525: mod_base = OTHER; note = N1-methylpseudouracil
  modified_base 4537: mod_base = OTHER; note = N1-methylpseudouracil
  modified_base 4541: mod_base = OTHER; note = N1-methylpseudouracil
  modified_base 4546: mod_base = OTHER; note = N1-methylpseudouracil
  modified_base 4550: mod_base = OTHER; note = N1-methylpseudouracil
  modified_base 4551: mod_base = OTHER; note = N1-methylpseudouracil
  modified_base 4553: mod_base = OTHER; note = N1-methylpseudouracil
  modified_base 4554: mod_base = OTHER; note = N1-methylpseudouracil
  modified_base 4560: mod_base = OTHER; note = N1-methylpseudouracil
  modified_base 4561: mod_base = OTHER; note = N1-methylpseudouracil
  modified_base 4567: mod_base = OTHER; note = N1-methylpseudouracil
  modified_base 4580: mod_base = OTHER; note = N1-methylpseudouracil
  modified_base 4583: mod_base = OTHER; note = N1-methylpseudouracil
  modified_base 4588: mod_base = OTHER; note = N1-methylpseudouracil
  modified_base 4589: mod_base = OTHER; note = N1-methylpseudouracil
  modified_base 4592: mod_base = OTHER; note = N1-methylpseudouracil
  modified_base 4600: mod_base = OTHER; note = N1-methylpseudouracil
  modified_base 4608: mod_base = OTHER; note = N1-methylpseudouracil
  modified_base 4611: mod_base = OTHER; note = N1-methylpseudouracil
  modified_base 4613: mod_base = OTHER; note = N1-methylpseudouracil
  modified_base 4614: mod_base = OTHER; note = N1-methylpseudouracil
  modified_base 4615: mod_base = OTHER; note = N1-methylpseudouracil
  modified_base 4619: mod_base = OTHER; note = N1-methylpseudouracil
  modified_base 4624: mod_base = OTHER; note = N1-methylpseudouracil
  modified_base 4626: mod_base = OTHER; note = N1-methylpseudouracil
  modified_base 4630: mod_base = OTHER; note = N1-methylpseudouracil
ggaggaaatcgcaaaatttgctcttcgcgttagatttcttttagttttctcgcaactagcaagctttttgttctcgccatgcagcggagccctctggagaaggccagcgtggtgagcaagctgttcttcagctggaccaggcccatcctgcgaaagggctacagacagaggctggagctgtccgacatctaccagattccatccgtggacagcgccgacaatctgagcgagaagctggagagggagtgggaccgcgagctggccagcaagaagaaccctaagctgatcaacgccctgcgccgctgcttcttctggaggttcatgttctacggcatcttcctgtacctgggcgaggtgaccaaggccgtccagcctctgctgctgggccgcatcatcgccagctacgatcccgacaacaaggaggaacgctccatcgccatctacctgggcatcggcctgtgtctgctgttcatcgtgcggaccctgctgctgcaccccgccatcttcggcctgcatcacatcggcatgcagatgaggatcgccatgttctccctgatctacaagaagaccctgaagctgtccagccgcgtgctggataagatcagcatcgggcagctggtgagcctgctgagcaacaacctgaacaagttcgacgaggggttggcgctggcccacttcgtgtggattgccccgctgcaggtggctctgctgatggggctgatctgggagctgctgcaggcctctgccttctgcgggctggggtttctgatcgtgctggccctgttccaagctggcctgggccgcatgatgatgaagtaccgcgatcagagggccggcaagatcagcgagcgcctggtgatcactagcgagatgatagagaacatccagagcgtgaaggcttactgttgggaggaggccatggagaagatgatcgagaacctgaggcagaccgagctgaagctgactagaaaggcagcctacgtgaggtatttcaactccagcgccttcttcttcagcggcttcttcgtggtgttcctgagcgtgctgccctacgccctgatcaagggcatcatcctgaggaagatcttcaccaccattagcttctgcatcgtgctgcgcatggccgtgaccaggcagttcccttgggccgtgcagacttggtacgacagcctgggagccatcaacaagatccaggactttctgcagaagcaggaatataagaccctggagtacaacctgaccaccaccgaggtggtgatggagaacgtgaccgccttctgggaggagggcttcggcgagctgttcgagaaggccaagcagaacaataacaaccgcaagaccagcaacggcgacgactccctcttcttcagcaactttagcctgctgggcacccctgtgctgaaggacatcaacttcaagatcgaaagaggccaactgctggccgtggccggatctaccggcgccggcaagaccagcctgctgatgatgatcatgggcgagctggagcccagcgagggcaagatcaagcacagcggccggatctccttctgctcccagttctcctggatcatgcccggcaccatcaaggagaacatcatcttcggcgtgagctacgacgagtacaggtaccggagcgtgatcaaggcctgccagctggaggaggacatctccaaatttgccgagaaggacaacattgtgctgggcgaaggcgggatcaccctgtccggtggccagcgtgcacgcatctccctggcccgggctgtgtacaaggacgccgacctgtacctgctggacagcccttttggctacctggacgtgctgaccgagaaggagatcttcgagtcctgcgtgtgtaagctgatggccaacaagaccagaatcctggtgaccagcaagatggagcatctgaagaaggccgacaagatcctgatcctgcacgaggggtccagctacttctacggcaccttcagcgagctgcagaacctgcagcccgacttcagctccaagctgatgggctgcgatagcttcgaccagttctccgccgagagaaggaactccattctgaccgagaccctgcaccgattctccctggagggagacgccccagtgagctggaccgagaccaagaagcagagcttcaagcagaccggcgagttcggagagaagcgcaagaactccatcctcaaccccatcaacagcatccggaagttcagcatcgtgcagaagacccctctgcagatgaacgggatcgaggaggacagcgacgagcccctggaacggcgactgtccctcgtgcccgacagcgagcagggcgaggccatcctgccccggatctccgtgatctccactgggcccaccctgcaagcccgacggcggcaaagcgtgctgaacctgatgacccacagcgtgaaccagggccagaatatccaccgcaagactacagccagcacccgcaaggtgagcctggctccccaggccaacctgaccgagctggacatctacagcaggaggctgagccaggagacaggcctggagatcagcgaggagatcaacgaggaggacctgaaggagtgcttcttcgacgacatggagtccatccccgccgtgaccacctggaacacctacctgagatacatcaccgtgcacaagagcctgatcttcgtgctgatctggtgcctggtgatcttcttggccgaggtagccgcctcactggtggtgctgtggctgctgggcaataccccactgcaggacaaggggaactccacccacagccggaacaacagctacgccgtgatcatcacctccaccagcagctactacgtgttctacatctacgtgggcgtggccgacacactgctggccatgggcttcttcagaggcctccctctggtgcacacactgatcaccgtgagcaagatcctgcaccacaagatgctgcacagcgtgctgcaggctcccatgtcaaccctgaacaccctgaaggccggcggcatcctgaacaggttcagcaaggacatcgccattctggacgatctgctgcccctgaccatcttcgacttcatccagctgctgctgatcgtgatcggggccatcgccgtggtggccgtgctgcagccctacatcttcgtggccacagtgcccgtgatcgtggccttcatcatgctgcgcgcctacttcctgcagacctcccagcagctgaagcagctggagagcgaaggccgcagccccatcttcacccacctggtgactagcctgaaggggctgtggaccctgcgcgccttcggcaggcagccctacttcgagaccctgttccacaaggctctgaacctgcacaccgccaactggttcctgtacctcagcaccctgcgctggttccagatgcggatcgagatgatcttcgtgatcttcttcatcgccgtgaccttcatctccatcctgaccaccggggaaggcgagggacgggtgggaatcatcctgaccctggccatgaatatcatgagcaccctgcagtgggccgtgaacagcagcatcgacgtggacagcctgatgcggtccgtgtcccgggtgttcaagttcatcgacatgcccaccgagggcaagcccaccaagagcaccaagccctacaagaacggccagctgagcaaggtgatgattatcgagaacagccacgtgaagaaggacgacatctggccttccggcggccagatgaccgtgaaggacctgaccgccaagtacaccgagggcggcaacgccatcctggagaacatcagcttctccattagccctggacagcgggtgggcctgttgggacggaccggcagtgggaagagcaccctgctgtccgccttcctgcggctgctgaacacggagggcgagatccagatcgacggggtgagctgggacagcatcaccctgcagcagtggcgaaaggccttcggcgtgatcccacagaaggtgtttattttctctggcacctttaggaagaacctggacccctacgagcagtggtccgaccaggagatctggaaggtggccgacgaggtgggcctgcggtcagtgatcgagcagttccccggcaagctggacttcgtgctggtggacggcggctgcgtgctgagccacggccacaagcagctgatgtgcctggcacgcagcgtgctgagcaaggccaagatcctgctgctggacgagccctccgcgcacctggatcccgtgacctaccagatcatcaggcggaccctgaagcaggccttcgccgactgcaccgtgatcctgtgcgagcacagaatcgaggctatgctggagtgccagcagttcctggtgatcgaggagaacaaggtgcggcagtacgactccatccagaagctgctgaacgagcgcagcctgttcagacaggctatctctcccagcgatcgcgtgaagctgttccctcacaggaacagcagcaagtgcaagtctaagccacagatcgccgccctgaaggaggagaccgaggaggaggtgcaggatacccgcctgtaaagctccccgggggcctcggtggcctagcttcttgccccttgggcctccccccagcccctcctccccttcctgcacccgtacccccgtggtctttgaataaagtctgagtgggcggcaaaaaaaaaaaaaaaaaaaaaaaaaaaaaaaaaaaaaaaaaaaaaaaaaaaaaaaaaaaaaaaaaaaaaaaaaaaaaaaaaaaaaaaaaaaaaaaaaaaa

SEQ ID NO: 13 - RNA, 4727 nt, synthetic construct
  source 1..4727: mol_type = other RNA
  modified_base 1: mod_base = OTHER; note = 7-Methylguanosine with triphosphate linkage
  modified_base 2: mod_base = OTHER; note = 2'-O-methyl modified nucleotide
  modified_base 9: mod_base = OTHER; note = N1-methylpseudouracil
  modified_base 17: mod_base = OTHER; note = N1-methylpseudouracil
  modified_base 18: mod_base = OTHER; note = N1-methylpseudouracil
  modified_base 19: mod_base = OTHER; note = N1-methylpseudouracil
  modified_base 22: mod_base = OTHER; note = N1-methylpseudouracil
  modified_base 24: mod_base = OTHER; note = N1-methylpseudouracil
  modified_base 25: mod_base = OTHER; note = N1-methylpseudouracil
  modified_base 30: mod_base = OTHER; note = N1-methylpseudouracil
  modified_base 31: mod_base = OTHER; note = N1-methylpseudouracil
  modified_base 35: mod_base = OTHER; note = N1-methylpseudouracil
  modified_base 36: mod_base = OTHER; note = N1-methylpseudouracil
  modified_base 37: mod_base = OTHER; note = N1-methylpseudouracil
  modified_base 39: mod_base = OTHER; note = N1-methylpseudouracil
  modified_base 40: mod_base = OTHER; note = N1-methylpseudouracil
  modified_base 41: mod_base = OTHER; note = N1-methylpseudouracil
  modified_base 42: mod_base = OTHER; note = N1-methylpseudouracil
  modified_base 45: mod_base = OTHER; note = N1-methylpseudouracil
  modified_base 46: mod_base = OTHER; note = N1-methylpseudouracil
  modified_base 47: mod_base = OTHER; note = N1-methylpseudouracil
  modified_base 48: mod_base = OTHER; note = N1-methylpseudouracil
  modified_base 50: mod_base = OTHER; note = N1-methylpseudouracil
  modified_base 57: mod_base = OTHER; note = N1-methylpseudouracil
  modified_base 65: mod_base = OTHER; note = N1-methylpseudouracil
  modified_base 66: mod_base = OTHER; note = N1-methylpseudouracil
  modified_base 67: mod_base = OTHER; note = N1-methylpseudouracil
  modified_base 68: mod_base = OTHER; note = N1-methylpseudouracil
  modified_base 69: mod_base = OTHER; note = N1-methylpseudouracil
  modified_base 71: mod_base = OTHER; note = N1-methylpseudouracil
  modified_base 72: mod_base = OTHER; note = N1-methylpseudouracil
  modified_base 74: mod_base = OTHER; note = N1-methylpseudouracil
  modified_base 80: mod_base = OTHER; note = N1-methylpseudouracil
  modified_base 93: mod_base = OTHER; note = N1-methylpseudouracil
  modified_base 95: mod_base = OTHER; note = N1-methylpseudouracil
  modified_base 110: mod_base = OTHER; note = N1-methylpseudouracil
  modified_base 113: mod_base = OTHER; note = N1-methylpseudouracil
  modified_base 122: mod_base = OTHER; note = N1-methylpseudouracil
  modified_base 124: mod_base = OTHER; note = N1-methylpseudouracil
  modified_base 125: mod_base = OTHER; note = N1-methylpseudouracil
  modified_base 127: mod_base = OTHER; note = N1-methylpseudouracil
  modified_base 128: mod_base = OTHER; note = N1-methylpseudouracil
  modified_base 133: mod_base = OTHER; note = N1-methylpseudouracil
  modified_base 146: mod_base = OTHER; note = N1-methylpseudouracil
  modified_base 149: mod_base = OTHER; note = N1-methylpseudouracil
  modified_base 160: mod_base = OTHER; note = N1-methylpseudouracil
  modified_base 173: mod_base = OTHER; note = N1-methylpseudouracil
  modified_base 179: mod_base = OTHER; note = N1-methylpseudouracil
  modified_base 181: mod_base = OTHER; note = N1-methylpseudouracil
  modified_base 188: mod_base = OTHER; note = N1-methylpseudouracil
  modified_base 190: mod_base = OTHER; note = N1-methylpseudouracil
  modified_base 197: mod_base = OTHER; note = N1-methylpseudouracil
  modified_base 198: mod_base = OTHER; note = N1-methylpseudouracil
  modified_base 202: mod_base = OTHER; note = N1-methylpseudouracil
  modified_base 206: mod_base = OTHER; note = N1-methylpseudouracil
  modified_base 222: mod_base = OTHER; note = N1-methylpseudouracil
  modified_base 224: mod_base = OTHER; note = N1-methylpseudouracil
  modified_base 236: mod_base = OTHER; note = N1-methylpseudouracil
  modified_base 247: mod_base = OTHER; note = N1-methylpseudouracil
  modified_base 260: mod_base = OTHER; note = N1-methylpseudouracil
  modified_base 279: mod_base = OTHER; note = N1-methylpseudouracil
  modified_base 284: mod_base = OTHER; note = N1-methylpseudouracil
  modified_base 287: mod_base = OTHER; note = N1-methylpseudouracil
  modified_base 296: mod_base = OTHER; note = N1-methylpseudouracil
  modified_base 304: mod_base = OTHER; note = N1-methylpseudouracil
  modified_base 307: mod_base = OTHER; note = N1-methylpseudouracil
  modified_base 308: mod_base = OTHER; note = N1-methylpseudouracil
  modified_base 310: mod_base = OTHER; note = N1-methylpseudouracil
  modified_base 311: mod_base = OTHER; note = N1-methylpseudouracil
  modified_base 313: mod_base = OTHER; note = N1-methylpseudouracil
  modified_base 319: mod_base = OTHER; note = N1-methylpseudouracil
  modified_base 320: mod_base = OTHER; note = N1-methylpseudouracil
  modified_base 323: mod_base = OTHER; note = N1-methylpseudouracil
  modified_base 325: mod_base = OTHER; note = N1-methylpseudouracil
  modified_base 326: mod_base = OTHER; note = N1-methylpseudouracil
  modified_base 328: mod_base = OTHER; note = N1-methylpseudouracil
  modified_base 335: mod_base = OTHER; note = N1-methylpseudouracil
  modified_base 337: mod_base = OTHER; note = N1-methylpseudouracil
  modified_base 338: mod_base = OTHER; note = N1-methylpseudouracil
  modified_base 341: mod_base = OTHER; note = N1-methylpseudouracil
  modified_base 343: mod_base = OTHER; note = N1-methylpseudouracil
  modified_base 347: mod_base = OTHER; note = N1-methylpseudouracil
  modified_base 356: mod_base = OTHER; note = N1-methylpseudouracil
  modified_base 368: mod_base = OTHER; note = N1-methylpseudouracil
  modified_base 375: mod_base = OTHER; note = N1-methylpseudouracil
  modified_base 377: mod_base = OTHER; note = N1-methylpseudouracil
  modified_base 380: mod_base = OTHER; note = N1-methylpseudouracil
  modified_base 383: mod_base = OTHER; note = N1-methylpseudouracil
  modified_base 392: mod_base = OTHER; note = N1-methylpseudouracil
  modified_base 395: mod_base = OTHER; note = N1-methylpseudouracil
  modified_base 403: mod_base = OTHER; note = N1-methylpseudouracil
  modified_base 408: mod_base = OTHER; note = N1-methylpseudouracil
  modified_base 430: mod_base = OTHER; note = N1-methylpseudouracil
  modified_base 434: mod_base = OTHER; note = N1-methylpseudouracil
  modified_base 440: mod_base = OTHER; note = N1-methylpseudouracil
  modified_base 442: mod_base = OTHER; note = N1-methylpseudouracil
  modified_base 446: mod_base = OTHER; note = N1-methylpseudouracil
  modified_base 452: mod_base = OTHER; note = N1-methylpseudouracil
  modified_base 458: mod_base = OTHER; note = N1-methylpseudouracil
  modified_base 460: mod_base = OTHER; note = N1-methylpseudouracil
  modified_base 462: mod_base = OTHER; note = N1-methylpseudouracil
  modified_base 464: mod_base = OTHER; note = N1-methylpseudouracil
  modified_base 467: mod_base = OTHER; note = N1-methylpseudouracil
  modified_base 469: mod_base = OTHER; note = N1-methylpseudouracil
  modified_base 470: mod_base = OTHER; note = N1-methylpseudouracil
  modified_base 473: mod_base = OTHER; note = N1-methylpseudouracil
  modified_base 476: mod_base = OTHER; note = N1-methylpseudouracil
  modified_base 485: mod_base = OTHER; note = N1-methylpseudouracil
  modified_base 488: mod_base = OTHER; note = N1-methylpseudouracil
  modified_base 491: mod_base = OTHER; note = N1-methylpseudouracil
  modified_base 503: mod_base = OTHER; note = N1-methylpseudouracil
  modified_base 505: mod_base = OTHER; note = N1-methylpseudouracil
  modified_base 506: mod_base = OTHER; note = N1-methylpseudouracil
  modified_base 512: mod_base = OTHER; note = N1-methylpseudouracil
  modified_base 516: mod_base = OTHER; note = N1-methylpseudouracil
  modified_base 521: mod_base = OTHER; note = N1-methylpseudouracil
  modified_base 527: mod_base = OTHER; note = N1-methylpseudouracil
  modified_base 533: mod_base = OTHER; note = N1-methylpseudouracil
  modified_base 539: mod_base = OTHER; note = N1-methylpseudouracil
  modified_base 545: mod_base = OTHER; note = N1-methylpseudouracil
  modified_base 547: mod_base = OTHER; note = N1-methylpseudouracil
  modified_base 548: mod_base = OTHER; note = N1-methylpseudouracil
  modified_base 550: mod_base = OTHER; note = N1-methylpseudouracil
  modified_base 554: mod_base = OTHER; note = N1-methylpseudouracil
  modified_base 557: mod_base = OTHER; note = N1-methylpseudouracil
  modified_base 559: mod_base = OTHER; note = N1-methylpseudouracil
  modified_base 572: mod_base = OTHER; note = N1-methylpseudouracil
  modified_base 578: mod_base = OTHER; note = N1-methylpseudouracil
  modified_base 580: mod_base = OTHER; note = N1-methylpseudouracil
  modified_base 590: mod_base = OTHER; note = N1-methylpseudouracil
  modified_base 593: mod_base = OTHER; note = N1-methylpseudouracil
  modified_base 597: mod_base = OTHER; note = N1-methylpseudouracil
  modified_base 602: mod_base = OTHER; note = N1-methylpseudouracil
  modified_base 608: mod_base = OTHER; note = N1-methylpseudouracil
  modified_base 617: mod_base = OTHER; note = N1-methylpseudouracil
  modified_base 620: mod_base = OTHER; note = N1-methylpseudouracil
  modified_base 626: mod_base = OTHER; note = N1-methylpseudouracil
  modified_base 629: mod_base = OTHER; note = N1-methylpseudouracil
  modified_base 641: mod_base = OTHER; note = N1-methylpseudouracil
  modified_base 649: mod_base = OTHER; note = N1-methylpseudouracil
  modified_base 650: mod_base = OTHER; note = N1-methylpseudouracil
  modified_base 661: mod_base = OTHER; note = N1-methylpseudouracil
  modified_base 662: mod_base = OTHER; note = N1-methylpseudouracil
  modified_base 668: mod_base = OTHER; note = N1-methylpseudouracil
  modified_base 676: mod_base = OTHER; note = N1-methylpseudouracil
  modified_base 677: mod_base = OTHER; note = N1-methylpseudouracil
  modified_base 680: mod_base = OTHER; note = N1-methylpseudouracil
  modified_base 682: mod_base = OTHER; note = N1-methylpseudouracil
  modified_base 686: mod_base = OTHER; note = N1-methylpseudouracil
  modified_base 687: mod_base = OTHER; note = N1-methylpseudouracil
  modified_base 695: mod_base = OTHER; note = N1-methylpseudouracil
  modified_base 701: mod_base = OTHER; note = N1-methylpseudouracil
  modified_base 705: mod_base = OTHER; note = N1-methylpseudouracil
  modified_base 707: mod_base = OTHER; note = N1-methylpseudouracil
  modified_base 710: mod_base = OTHER; note = N1-methylpseudouracil
  modified_base 713: mod_base = OTHER; note = N1-methylpseudouracil
  modified_base 719: mod_base = OTHER; note = N1-methylpseudouracil
  modified_base 722: mod_base = OTHER; note = N1-methylpseudouracil
  modified_base 724: mod_base = OTHER; note = N1-methylpseudouracil
  modified_base 731: mod_base = OTHER; note = N1-methylpseudouracil
  modified_base 734: mod_base = OTHER; note = N1-methylpseudouracil
  modified_base 742: mod_base = OTHER; note = N1-methylpseudouracil
  modified_base 744: mod_base = OTHER; note = N1-methylpseudouracil
  modified_base 748: mod_base = OTHER; note = N1-methylpseudouracil
  modified_base 749: mod_base = OTHER; note = N1-methylpseudouracil
  modified_base 751: mod_base = OTHER; note = N1-methylpseudouracil
  modified_base 758: mod_base = OTHER; note = N1-methylpseudouracil
  modified_base 763: mod_base = OTHER; note = N1-methylpseudouracil
  modified_base 764: mod_base = OTHER; note = N1-methylpseudouracil
  modified_base 765: mod_base = OTHER; note = N1-methylpseudouracil
  modified_base 767: mod_base = OTHER; note = N1-methylpseudouracil
  modified_base 770: mod_base = OTHER; note = N1-methylpseudouracil
  modified_base 773: mod_base = OTHER; note = N1-methylpseudouracil
  modified_base 776: mod_base = OTHER; note = N1-methylpseudouracil
  modified_base 782: mod_base = OTHER; note = N1-methylpseudouracil
  modified_base 784: mod_base = OTHER; note = N1-methylpseudouracil
  modified_base 785: mod_base = OTHER; note = N1-methylpseudouracil
  modified_base 792: mod_base = OTHER; note = N1-methylpseudouracil
  modified_base 797: mod_base = OTHER; note = N1-methylpseudouracil
  modified_base 806: mod_base = OTHER; note = N1-methylpseudouracil
  modified_base 809: mod_base = OTHER; note = N1-methylpseudouracil
  modified_base 812: mod_base = OTHER; note = N1-methylpseudouracil
  modified_base 817: mod_base = OTHER; note = N1-methylpseudouracil
  modified_base 825: mod_base = OTHER; note = N1-methylpseudouracil
  modified_base 842: mod_base = OTHER; note = N1-methylpseudouracil
  modified_base 854: mod_base = OTHER; note = N1-methylpseudouracil
  modified_base 857: mod_base = OTHER; note = N1-methylpseudouracil
  modified_base 860: mod_base = OTHER; note = N1-methylpseudouracil
  modified_base 864: mod_base = OTHER; note = N1-methylpseudouracil
  modified_base 872: mod_base = OTHER; note = N1-methylpseudouracil
  modified_base 875: mod_base = OTHER; note = N1-methylpseudouracil
  modified_base 884: mod_base = OTHER; note = N1-methylpseudouracil
  modified_base 893: mod_base = OTHER; note = N1-methylpseudouracil
  modified_base 900: mod_base = OTHER; note = N1-methylpseudouracil
  modified_base 901: mod_base = OTHER; note = N1-methylpseudouracil
  modified_base 904: mod_base = OTHER; note = N1-methylpseudouracil
  modified_base 906: mod_base = OTHER; note = N1-methylpseudouracil
  modified_base 907: mod_base = OTHER; note = N1-methylpseudouracil
  modified_base 920: mod_base = OTHER; note = N1-methylpseudouracil
  modified_base 929: mod_base = OTHER; note = N1-methylpseudouracil
  modified_base 932: mod_base = OTHER; note = N1-methylpseudouracil
  modified_base 941: mod_base = OTHER; note = N1-methylpseudouracil
  modified_base 956: mod_base = OTHER; note = N1-methylpseudouracil
  modified_base 962: mod_base = OTHER; note = N1-methylpseudouracil
  modified_base 966: mod_base = OTHER; note = N1-methylpseudouracil
  modified_base 979: mod_base = OTHER; note = N1-methylpseudouracil
  modified_base 983: mod_base = OTHER; note = N1-methylpseudouracil
  modified_base 988: mod_base = OTHER; note = N1-methylpseudouracil
  modified_base 990: mod_base = OTHER; note = N1-methylpseudouracil
  modified_base 991: mod_base = OTHER; note = N1-methylpseudouracil
  modified_base 992: mod_base = OTHER; note = N1-methylpseudouracil
  modified_base 997: mod_base = OTHER; note = N1-methylpseudouracil
  modified_base 1006: mod_base = OTHER; note = N1-methylpseudouracil
  modified_base 1007: mod_base = OTHER; note = N1-methylpseudouracil
  modified_base 1009: mod_base = OTHER; note = N1-methylpseudouracil
  modified_base 1010: mod_base = OTHER; note = N1-methylpseudouracil
  modified_base 1012: mod_base = OTHER; note = N1-methylpseudouracil
  modified_base 1013: mod_base = OTHER; note = N1-methylpseudouracil
  modified_base 1021: mod_base = OTHER; note = N1-methylpseudouracil
  modified_base 1022: mod_base = OTHER; note = N1-methylpseudouracil
  modified_base 1024: mod_base = OTHER; note = N1-methylpseudouracil
  modified_base 1025: mod_base = OTHER; note = N1-methylpseudouracil
  modified_base 1028: mod_base = OTHER; note = N1-methylpseudouracil
  modified_base 1031: mod_base = OTHER; note = N1-methylpseudouracil
  modified_base 1033: mod_base = OTHER; note = N1-methylpseudouracil
  modified_base 1034: mod_base = OTHER; note = N1-methylpseudouracil
  modified_base 1037: mod_base = OTHER; note = N1-methylpseudouracil
  modified_base 1043: mod_base = OTHER; note = N1-methylpseudouracil
  modified_base 1046: mod_base = OTHER; note = N1-methylpseudouracil
  modified_base 1051: mod_base = OTHER; note = N1-methylpseudouracil
  modified_base 1058: mod_base = OTHER; note = N1-methylpseudouracil
  modified_base 1061: mod_base = OTHER; note = N1-methylpseudouracil
  modified_base 1070: mod_base = OTHER; note = N1-methylpseudouracil
  modified_base 1073: mod_base = OTHER; note = N1-methylpseudouracil
  modified_base 1076: mod_base = OTHER; note = N1-methylpseudouracil
  modified_base 1085: mod_base = OTHER; note = N1-methylpseudouracil
  modified_base 1087: mod_base = OTHER; note = N1-methylpseudouracil
  modified_base 1088: mod_base = OTHER; note = N1-methylpseudouracil
  modified_base 1097: mod_base = OTHER; note = N1-methylpseudouracil
  modified_base 1098: mod_base = OTHER; note = N1-methylpseudouracil
  modified_base 1102: mod_base = OTHER; note = N1-methylpseudouracil
  modified_base 1103: mod_base = OTHER; note = N1-methylpseudouracil
  modified_base 1105: mod_base = OTHER; note = N1-methylpseudouracil
  modified_base 1109: mod_base = OTHER; note = N1-methylpseudouracil
  modified_base 1112: mod_base = OTHER; note = N1-methylpseudouracil
  modified_base 1115: mod_base = OTHER; note = N1-methylpseudouracil
  modified_base 1121: mod_base = OTHER; note = N1-methylpseudouracil
  modified_base 1127: mod_base = OTHER; note = N1-methylpseudouracil
  modified_base 1138: mod_base = OTHER; note = N1-methylpseudouracil
  modified_base 1139: mod_base = OTHER; note = N1-methylpseudouracil
  modified_base 1143: mod_base = OTHER; note = N1-methylpseudouracil
  modified_base 1144: mod_base = OTHER; note = N1-methylpseudouracil
  modified_base 1151: mod_base = OTHER; note = N1-methylpseudouracil
  modified_base 1158: mod_base = OTHER; note = N1-methylpseudouracil
  modified_base 1159: mod_base = OTHER; note = N1-methylpseudouracil
  modified_base 1162: mod_base = OTHER; note = N1-methylpseudouracil
  modified_base 1172: mod_base = OTHER; note = N1-methylpseudouracil
  modified_base 1181: mod_base = OTHER; note = N1-methylpseudouracil
  modified_base 1190: mod_base = OTHER; note = N1-methylpseudouracil
  modified_base 1198: mod_base = OTHER; note = N1-methylpseudouracil
  modified_base 1199: mod_base = OTHER; note = N1-methylpseudouracil
  modified_base 1200: mod_base = OTHER; note = N1-methylpseudouracil
  modified_base 1202: mod_base = OTHER; note = N1-methylpseudouracil
  modified_base 1216: mod_base = OTHER; note = N1-methylpseudouracil
  modified_base 1218: mod_base = OTHER; note = N1-methylpseudouracil
  modified_base 1226: mod_base = OTHER; note = N1-methylpseudouracil
  modified_base 1231: mod_base = OTHER; note = N1-methylpseudouracil
  modified_base 1238: mod_base = OTHER; note = N1-methylpseudouracil
  modified_base 1253: mod_base = OTHER; note = N1-methylpseudouracil
  modified_base 1256: mod_base = OTHER; note = N1-methylpseudouracil
  modified_base 1259: mod_base = OTHER; note = N1-methylpseudouracil
  modified_base 1268: mod_base = OTHER; note = N1-methylpseudouracil
  modified_base 1276: mod_base = OTHER; note = N1-methylpseudouracil
  modified_base 1277: mod_base = OTHER; note = N1-methylpseudouracil
  modified_base 1279: mod_base = OTHER; note = N1-methylpseudouracil
  modified_base 1291: mod_base = OTHER; note = N1-methylpseudouracil
  modified_base 1292: mod_base = OTHER; note = N1-methylpseudouracil
  modified_base 1301: mod_base = OTHER; note = N1-methylpseudouracil
  modified_base 1303: mod_base = OTHER; note = N1-methylpseudouracil
  modified_base 1304: mod_base = OTHER; note = N1-methylpseudouracil
  modified_base 1326: mod_base = OTHER; note = N1-methylpseudouracil
  modified_base 1357: mod_base = OTHER; note = N1-methylpseudouracil
  modified_base 1361: mod_base = OTHER; note = N1-methylpseudouracil
  modified_base 1363: mod_base = OTHER; note = N1-methylpseudouracil
  modified_base 1364: mod_base = OTHER; note = N1-methylpseudouracil
  modified_base 1366: mod_base = OTHER; note = N1-methylpseudouracil
  modified_base 1367: mod_base = OTHER; note = N1-methylpseudouracil
  modified_base 1375: mod_base = OTHER; note = N1-methylpseudouracil
  modified_base 1376: mod_base = OTHER; note = N1-methylpseudouracil
  modified_base 1377: mod_base = OTHER; note = N1-methylpseudouracil
  modified_base 1382: mod_base = OTHER; note = N1-methylpseudouracil
  modified_base 1385: mod_base = OTHER; note = N1-methylpseudouracil
  modified_base 1395: mod_base = OTHER; note = N1-methylpseudouracil
  modified_base 1397: mod_base = OTHER; note = N1-methylpseudouracil
  modified_base 1400: mod_base = OTHER; note = N1-methylpseudouracil
  modified_base 1409: mod_base = OTHER; note = N1-methylpseudouracil
  modified_base 1414: mod_base = OTHER; note = N1-methylpseudouracil
  modified_base 1415: mod_base = OTHER; note = N1-methylpseudouracil
  modified_base 1421: mod_base = OTHER; note = N1-methylpseudouracil
  modified_base 1436: mod_base = OTHER; note = N1-methylpseudouracil
  modified_base 1439: mod_base = OTHER; note = N1-methylpseudouracil
  modified_base 1445: mod_base = OTHER; note = N1-methylpseudouracil
  modified_base 1453: mod_base = OTHER; note = N1-methylpseudouracil
  modified_base 1455: mod_base = OTHER; note = N1-methylpseudouracil
  modified_base 1478: mod_base = OTHER; note = N1-methylpseudouracil
  modified_base 1481: mod_base = OTHER; note = N1-methylpseudouracil
  modified_base 1484: mod_base = OTHER; note = N1-methylpseudouracil
  modified_base 1487: mod_base = OTHER; note = N1-methylpseudouracil
  modified_base 1490: mod_base = OTHER; note = N1-methylpseudouracil
  modified_base 1493: mod_base = OTHER; note = N1-methylpseudouracil
  modified_base 1502: mod_base = OTHER; note = N1-methylpseudouracil
  modified_base 1523: mod_base = OTHER; note = N1-methylpseudouracil
  modified_base 1541: mod_base = OTHER; note = N1-methylpseudouracil
  modified_base 1543: mod_base = OTHER; note = N1-methylpseudouracil
  modified_base 1546: mod_base = OTHER; note = N1-methylpseudouracil
  modified_base 1547: mod_base = OTHER; note = N1-methylpseudouracil
  modified_base 1549: mod_base = OTHER; note = N1-methylpseudouracil
  modified_base 1552: mod_base = OTHER; note = N1-methylpseudouracil
  modified_base 1558: mod_base = OTHER; note = N1-methylpseudouracil
  modified_base 1559: mod_base = OTHER; note = N1-methylpseudouracil
  modified_base 1561: mod_base = OTHER; note = N1-methylpseudouracil
  modified_base 1564: mod_base = OTHER; note = N1-methylpseudouracil
  modified_base 1568: mod_base = OTHER; note = N1-methylpseudouracil
  modified_base 1571: mod_base = OTHER; note = N1-methylpseudouracil
  modified_base 1583: mod_base = OTHER; note = N1-methylpseudouracil
  modified_base 1595: mod_base = OTHER; note = N1-methylpseudouracil
  modified_base 1598: mod_base = OTHER; note = N1-methylpseudouracil
  modified_base 1600: mod_base = OTHER; note = N1-methylpseudouracil
  modified_base 1601: mod_base = OTHER; note = N1-methylpseudouracil
  modified_base 1607: mod_base = OTHER; note = N1-methylpseudouracil
  modified_base 1612: mod_base = OTHER; note = N1-methylpseudouracil
  modified_base 1621: mod_base = OTHER; note = N1-methylpseudouracil
  modified_base 1627: mod_base = OTHER; note = N1-methylpseudouracil
  modified_base 1637: mod_base = OTHER; note = N1-methylpseudouracil
  modified_base 1640: mod_base = OTHER; note = N1-methylpseudouracil
  modified_base 1648: mod_base = OTHER; note = N1-methylpseudouracil
  modified_base 1655: mod_base = OTHER; note = N1-methylpseudouracil
  modified_base 1667: mod_base = OTHER; note = N1-methylpseudouracil
  modified_base 1669: mod_base = OTHER; note = N1-methylpseudouracil
  modified_base 1675: mod_base = OTHER; note = N1-methylpseudouracil
  modified_base 1676: mod_base = OTHER; note = N1-methylpseudouracil
  modified_base 1677: mod_base = OTHER; note = N1-methylpseudouracil
  modified_base 1694: mod_base = OTHER; note = N1-methylpseudouracil
  modified_base 1695: mod_base = OTHER; note = N1-methylpseudouracil
  modified_base 1697: mod_base = OTHER; note = N1-methylpseudouracil
  modified_base 1700: mod_base = OTHER; note = N1-methylpseudouracil
  modified_base 1715: mod_base = OTHER; note = N1-methylpseudouracil
  modified_base 1721: mod_base = OTHER; note = N1-methylpseudouracil
  modified_base 1723: mod_base = OTHER; note = N1-methylpseudouracil
  modified_base 1728: mod_base = OTHER; note = N1-methylpseudouracil
  modified_base 1737: mod_base = OTHER; note = N1-methylpseudouracil
  modified_base 1745: mod_base = OTHER; note = N1-methylpseudouracil
  modified_base 1747: mod_base = OTHER; note = N1-methylpseudouracil
  modified_base 1751: mod_base = OTHER; note = N1-methylpseudouracil
  modified_base 1761: mod_base = OTHER; note = N1-methylpseudouracil
  modified_base 1763: mod_base = OTHER; note = N1-methylpseudouracil
  modified_base 1765: mod_base = OTHER; note = N1-methylpseudouracil
  modified_base 1781: mod_base = OTHER; note = N1-methylpseudouracil
  modified_base 1783: mod_base = OTHER; note = N1-methylpseudouracil
  modified_base 1787: mod_base = OTHER; note = N1-methylpseudouracil
  modified_base 1790: mod_base = OTHER; note = N1-methylpseudouracil
  modified_base 1800: mod_base = OTHER; note = N1-methylpseudouracil
  modified_base 1801: mod_base = OTHER; note = N1-methylpseudouracil
  modified_base 1802: mod_base = OTHER; note = N1-methylpseudouracil
  modified_base 1803: mod_base = OTHER; note = N1-methylpseudouracil
  modified_base 1807: mod_base = OTHER; note = N1-methylpseudouracil
  modified_base 1811: mod_base = OTHER; note = N1-methylpseudouracil
  modified_base 1817: mod_base = OTHER; note = N1-methylpseudouracil
  modified_base 1820: mod_base = OTHER; note = N1-methylpseudouracil
  modified_base 1835: mod_base = OTHER; note = N1-methylpseudouracil
  modified_base 1837: mod_base = OTHER; note = N1-methylpseudouracil
  modified_base 1838: mod_base = OTHER; note = N1-methylpseudouracil
  modified_base 1843: mod_base = OTHER; note = N1-methylpseudouracil
  modified_base 1846: mod_base = OTHER; note = N1-methylpseudouracil
  modified_base 1850: mod_base = OTHER; note = N1-methylpseudouracil
  modified_base 1852: mod_base = OTHER; note = N1-methylpseudouracil
  modified_base 1854: mod_base = OTHER; note = N1-methylpseudouracil
  modified_base 1859: mod_base = OTHER; note = N1-methylpseudouracil
  modified_base 1862: mod_base = OTHER; note = N1-methylpseudouracil
  modified_base 1880: mod_base = OTHER; note = N1-methylpseudouracil
  modified_base 1883: mod_base = OTHER; note = N1-methylpseudouracil
  modified_base 1886: mod_base = OTHER; note = N1-methylpseudouracil
  modified_base 1898: mod_base = OTHER; note = N1-methylpseudouracil
  modified_base 1905: mod_base = OTHER; note = N1-methylpseudouracil
  modified_base 1907: mod_base = OTHER; note = N1-methylpseudouracil
  modified_base 1925: mod_base = OTHER; note = N1-methylpseudouracil
  modified_base 1928: mod_base = OTHER; note = N1-methylpseudouracil
  modified_base 1931: mod_base = OTHER; note = N1-methylpseudouracil
  modified_base 1934: mod_base = OTHER; note = N1-methylpseudouracil
  modified_base 1945: mod_base = OTHER; note = N1-methylpseudouracil
  modified_base 1951: mod_base = OTHER; note = N1-methylpseudouracil
  modified_base 1954: mod_base = OTHER; note = N1-methylpseudouracil
  modified_base 1955: mod_base = OTHER; note = N1-methylpseudouracil
  modified_base 1957: mod_base = OTHER; note = N1-methylpseudouracil
  modified_base 1966: mod_base = OTHER; note = N1-methylpseudouracil
  modified_base 1967: mod_base = OTHER; note = N1-methylpseudouracil
  modified_base 1976: mod_base = OTHER; note = N1-methylpseudouracil
  modified_base 1985: mod_base = OTHER; note = N1-methylpseudouracil
  modified_base 1996: mod_base = OTHER; note = N1-methylpseudouracil
  modified_base 1997: mod_base = OTHER; note = N1-methylpseudouracil
  modified_base 2002: mod_base = OTHER; note = N1-methylpseudouracil
  modified_base 2009: mod_base = OTHER; note = N1-methylpseudouracil
  modified_base 2012: mod_base = OTHER; note = N1-methylpseudouracil
  modified_base 2017: mod_base = OTHER; note = N1-methylpseudouracil
  modified_base 2022: mod_base = OTHER; note = N1-methylpseudouracil
  modified_base 2026: mod_base = OTHER; note = N1-methylpseudouracil
  modified_base 2027: mod_base = OTHER; note = N1-methylpseudouracil
  modified_base 2035: mod_base = OTHER; note = N1-methylpseudouracil
  modified_base 2036: mod_base = OTHER; note = N1-methylpseudouracil
  modified_base 2038: mod_base = OTHER; note = N1-methylpseudouracil
  modified_base 2056: mod_base = OTHER; note = N1-methylpseudouracil
  modified_base 2060: mod_base = OTHER; note = N1-methylpseudouracil
  modified_base 2061: mod_base = OTHER; note = N1-methylpseudouracil
  modified_base 2063: mod_base = OTHER; note = N1-methylpseudouracil
  modified_base 2075: mod_base = OTHER; note = N1-methylpseudouracil
  modified_base 2083: mod_base = OTHER; note = N1-methylpseudouracil
  modified_base 2084: mod_base = OTHER; note = N1-methylpseudouracil
  modified_base 2086: mod_base = OTHER; note = N1-methylpseudouracil
  modified_base 2090: mod_base = OTHER; note = N1-methylpseudouracil
  modified_base 2108: mod_base = OTHER; note = N1-methylpseudouracil
  modified_base 2113: mod_base = OTHER; note = N1-methylpseudouracil
  modified_base 2137: mod_base = OTHER; note = N1-methylpseudouracil
  modified_base 2138: mod_base = OTHER; note = N1-methylpseudouracil
  modified_base 2155: mod_base = OTHER; note = N1-methylpseudouracil
  modified_base 2156: mod_base = OTHER; note = N1-methylpseudouracil
  modified_base 2176: mod_base = OTHER; note = N1-methylpseudouracil
  modified_base 2180: mod_base = OTHER; note = N1-methylpseudouracil
  modified_base 2183: mod_base = OTHER; note = N1-methylpseudouracil
  modified_base 2192: mod_base = OTHER; note = N1-methylpseudouracil
  modified_base 2201: mod_base = OTHER; note = N1-methylpseudouracil
  modified_base 2209: mod_base = OTHER; note = N1-methylpseudouracil
  modified_base 2210: mod_base = OTHER; note = N1-methylpseudouracil
  modified_base 2216: mod_base = OTHER; note = N1-methylpseudouracil
  modified_base 2219: mod_base = OTHER; note = N1-methylpseudouracil
  modified_base 2232: mod_base = OTHER; note = N1-methylpseudouracil
  modified_base 2234: mod_base = OTHER; note = N1-methylpseudouracil
  modified_base 2240: mod_base = OTHER; note = N1-methylpseudouracil
  modified_base 2249: mod_base = OTHER; note = N1-methylpseudouracil
  modified_base 2273: mod_base = OTHER; note = N1-methylpseudouracil
  modified_base 2285: mod_base = OTHER; note = N1-methylpseudouracil
  modified_base 2287: mod_base = OTHER; note = N1-methylpseudouracil
  modified_base 2291: mod_base = OTHER; note = N1-methylpseudouracil
  modified_base 2294: mod_base = OTHER; note = N1-methylpseudouracil
  modified_base 2321: mod_base = OTHER; note = N1-methylpseudouracil
  modified_base 2324: mod_base = OTHER; note = N1-methylpseudouracil
  modified_base 2333: mod_base = OTHER; note = N1-methylpseudouracil
  modified_base 2335: mod_base = OTHER; note = N1-methylpseudouracil
  modified_base 2339: mod_base = OTHER; note = N1-methylpseudouracil
  modified_base 2342: mod_base = OTHER; note = N1-methylpseudouracil
  modified_base 2344: mod_base = OTHER; note = N1-methylpseudouracil
  modified_base 2349: mod_base = OTHER; note = N1-methylpseudouracil
  modified_base 2360: mod_base = OTHER; note = N1-methylpseudouracil
  modified_base 2384: mod_base = OTHER; note = N1-methylpseudouracil
  modified_base 2387: mod_base = OTHER; note = N1-methylpseudouracil
  modified_base 2393: mod_base = OTHER; note = N1-methylpseudouracil
  modified_base 2396: mod_base = OTHER; note = N1-methylpseudouracil
  modified_base 2408: mod_base = OTHER; note = N1-methylpseudouracil
  modified_base 2424: mod_base = OTHER; note = N1-methylpseudouracil
  modified_base 2426: mod_base = OTHER; note = N1-methylpseudouracil
  modified_base 2439: mod_base = OTHER; note = N1-methylpseudouracil
  modified_base 2459: mod_base = OTHER; note = N1-methylpseudouracil
  modified_base 2465: mod_base = OTHER; note = N1-methylpseudouracil
  modified_base 2469: mod_base = OTHER; note = N1-methylpseudouracil
  modified_base 2483: mod_base = OTHER; note = N1-methylpseudouracil
  modified_base 2492: mod_base = OTHER; note = N1-methylpseudouracil
  modified_base 2498: mod_base = OTHER; note = N1-methylpseudouracil
  modified_base 2500: mod_base = OTHER; note = N1-methylpseudouracil
  modified_base 2513: mod_base = OTHER; note = N1-methylpseudouracil
  modified_base 2531: mod_base = OTHER; note = N1-methylpseudouracil
  modified_base 2537: mod_base = OTHER; note = N1-methylpseudouracil
  modified_base 2549: mod_base = OTHER; note = N1-methylpseudouracil
  modified_base 2564: mod_base = OTHER; note = N1-methylpseudouracil
  modified_base 2572: mod_base = OTHER; note = N1-methylpseudouracil
  modified_base 2575: mod_base = OTHER; note = N1-methylpseudouracil
  modified_base 2576: mod_base = OTHER; note = N1-methylpseudouracil
  modified_base 2578: mod_base = OTHER; note = N1-methylpseudouracil
  modified_base 2579: mod_base = OTHER; note = N1-methylpseudouracil
  modified_base 2588: mod_base = OTHER; note = N1-methylpseudouracil
  modified_base 2593: mod_base = OTHER; note = N1-methylpseudouracil
  modified_base 2597: mod_base = OTHER; note = N1-methylpseudouracil
  modified_base 2606: mod_base = OTHER; note = N1-methylpseudouracil
  modified_base 2614: mod_base = OTHER; note = N1-methylpseudouracil
  modified_base 2623: mod_base = OTHER; note = N1-methylpseudouracil
  modified_base 2627: mod_base = OTHER; note = N1-methylpseudouracil
  modified_base 2632: mod_base = OTHER; note = N1-methylpseudouracil
  modified_base 2636: mod_base = OTHER; note = N1-methylpseudouracil
  modified_base 2642: mod_base = OTHER; note = N1-methylpseudouracil
  modified_base 2654: mod_base = OTHER; note = N1-methylpseudouracil
  modified_base 2657: mod_base = OTHER; note = N1-methylpseudouracil
  modified_base 2659: mod_base = OTHER; note = N1-methylpseudouracil
  modified_base 2660: mod_base = OTHER; note = N1-methylpseudouracil
  modified_base 2663: mod_base = OTHER; note = N1-methylpseudouracil
  modified_base 2666: mod_base = OTHER; note = N1-methylpseudouracil
  modified_base 2669: mod_base = OTHER; note = N1-methylpseudouracil
  modified_base 2671: mod_base = OTHER; note = N1-methylpseudouracil
  modified_base 2674: mod_base = OTHER; note = N1-methylpseudouracil
  modified_base 2678: mod_base = OTHER; note = N1-methylpseudouracil
  modified_base 2681: mod_base = OTHER; note = N1-methylpseudouracil
  modified_base 2684: mod_base = OTHER; note = N1-methylpseudouracil
  modified_base 2686: mod_base = OTHER; note = N1-methylpseudouracil
  modified_base 2687: mod_base = OTHER; note = N1-methylpseudouracil
  modified_base 2689: mod_base = OTHER; note = N1-methylpseudouracil
  modified_base 2690: mod_base = OTHER; note = N1-methylpseudouracil
  modified_base 2699: mod_base = OTHER; note = N1-methylpseudouracil
  modified_base 2707: mod_base = OTHER; note = N1-methylpseudouracil
  modified_base 2711: mod_base = OTHER; note = N1-methylpseudouracil
  modified_base 2714: mod_base = OTHER; note = N1-methylpseudouracil
  modified_base 2717: mod_base = OTHER; note = N1-methylpseudouracil
  modified_base 2720: mod_base = OTHER; note = N1-methylpseudouracil
  modified_base 2722: mod_base = OTHER; note = N1-methylpseudouracil
  modified_base 2726: mod_base = OTHER; note = N1-methylpseudouracil
  modified_base 2729: mod_base = OTHER; note = N1-methylpseudouracil
  modified_base 2736: mod_base = OTHER; note = N1-methylpseudouracil
  modified_base 2744: mod_base = OTHER; note = N1-methylpseudouracil
  modified_base 2761: mod_base = OTHER; note = N1-methylpseudouracil
  modified_base 2785: mod_base = OTHER; note = N1-methylpseudouracil
  modified_base 2792: mod_base = OTHER; note = N1-methylpseudouracil
  modified_base 2795: mod_base = OTHER; note = N1-methylpseudouracil
  modified_base 2798: mod_base = OTHER; note = N1-methylpseudouracil
  modified_base 2803: mod_base = OTHER; note = N1-methylpseudouracil
  modified_base 2815: mod_base = OTHER; note = N1-methylpseudouracil
  modified_base 2818: mod_base = OTHER; note = N1-methylpseudouracil
  modified_base 2822: mod_base = OTHER; note = N1-methylpseudouracil
  modified_base 2824: mod_base = OTHER; note = N1-methylpseudouracil
  modified_base 2825: mod_base = OTHER; note = N1-methylpseudouracil
  modified_base 2827: mod_base = OTHER; note = N1-methylpseudouracil
  modified_base 2831: mod_base = OTHER; note = N1-methylpseudouracil
  modified_base 2833: mod_base = OTHER; note = N1-methylpseudouracil
  modified_base 2837: mod_base = OTHER; note = N1-methylpseudouracil
  modified_base 2843: mod_base = OTHER; note = N1-methylpseudouracil
  modified_base 2855: mod_base = OTHER; note = N1-methylpseudouracil
  modified_base 2858: mod_base = OTHER; note = N1-methylpseudouracil
  modified_base 2864: mod_base = OTHER; note = N1-methylpseudouracil
  modified_base 2869: mod_base = OTHER; note = N1-methylpseudouracil
  modified_base 2870: mod_base = OTHER; note = N1-methylpseudouracil
  modified_base 2872: mod_base = OTHER; note = N1-methylpseudouracil
  modified_base 2873: mod_base = OTHER; note = N1-methylpseudouracil
  modified_base 2882: mod_base = OTHER; note = N1-methylpseudouracil
  modified_base 2886: mod_base = OTHER; note = N1-methylpseudouracil
  modified_base 2888: mod_base = OTHER; note = N1-methylpseudouracil
  modified_base 2891: mod_base = OTHER; note = N1-methylpseudouracil
  modified_base 2900: mod_base = OTHER; note = N1-methylpseudouracil
  modified_base 2903: mod_base = OTHER; note = N1-methylpseudouracil
  modified_base 2909: mod_base = OTHER; note = N1-methylpseudouracil
  modified_base 2918: mod_base = OTHER; note = N1-methylpseudouracil
  modified_base 2921: mod_base = OTHER; note = N1-methylpseudouracil
  modified_base 2933: mod_base = OTHER; note = N1-methylpseudouracil
  modified_base 2936: mod_base = OTHER; note = N1-methylpseudouracil
  modified_base 2945: mod_base = OTHER; note = N1-methylpseudouracil
  modified_base 2948: mod_base = OTHER; note = N1-methylpseudouracil
  modified_base 2955: mod_base = OTHER; note = N1-methylpseudouracil
  modified_base 2960: mod_base = OTHER; note = N1-methylpseudouracil
  modified_base 2962: mod_base = OTHER; note = N1-methylpseudouracil
  modified_base 2969: mod_base = OTHER; note = N1-methylpseudouracil
  modified_base 2978: mod_base = OTHER; note = N1-methylpseudouracil
  modified_base 2993: mod_base = OTHER; note = N1-methylpseudouracil
  modified_base 2996: mod_base = OTHER; note = N1-methylpseudouracil
  modified_base 3004: mod_base = OTHER; note = N1-methylpseudouracil
  modified_base 3005: mod_base = OTHER; note = N1-methylpseudouracil
  modified_base 3017: mod_base = OTHER; note = N1-methylpseudouracil
  modified_base 3023: mod_base = OTHER; note = N1-methylpseudouracil
  modified_base 3024: mod_base = OTHER; note = N1-methylpseudouracil
  modified_base 3026: mod_base = OTHER; note = N1-methylpseudouracil
  modified_base 3033: mod_base = OTHER; note = N1-methylpseudouracil
  modified_base 3035: mod_base = OTHER; note = N1-methylpseudouracil
  modified_base 3038: mod_base = OTHER; note = N1-methylpseudouracil
  modified_base 3044: mod_base = OTHER; note = N1-methylpseudouracil
  modified_base 3050: mod_base = OTHER; note = N1-methylpseudouracil
  modified_base 3052: mod_base = OTHER; note = N1-methylpseudouracil
  modified_base 3053: mod_base = OTHER; note = N1-methylpseudouracil
  modified_base 3058: mod_base = OTHER; note = N1-methylpseudouracil
  modified_base 3059: mod_base = OTHER; note = N1-methylpseudouracil
  modified_base 3062: mod_base = OTHER; note = N1-methylpseudouracil
  modified_base 3068: mod_base = OTHER; note = N1-methylpseudouracil
  modified_base 3071: mod_base = OTHER; note = N1-methylpseudouracil
  modified_base 3074: mod_base = OTHER; note = N1-methylpseudouracil
  modified_base 3077: mod_base = OTHER; note = N1-methylpseudouracil
  modified_base 3080: mod_base = OTHER; note = N1-methylpseudouracil
  modified_base 3083: mod_base = OTHER; note = N1-methylpseudouracil
  modified_base 3092: mod_base = OTHER; note = N1-methylpseudouracil
  modified_base 3098: mod_base = OTHER; note = N1-methylpseudouracil
  modified_base 3101: mod_base = OTHER; note = N1-methylpseudouracil
  modified_base 3107: mod_base = OTHER; note = N1-methylpseudouracil
  modified_base 3110: mod_base = OTHER; note = N1-methylpseudouracil
  modified_base 3118: mod_base = OTHER; note = N1-methylpseudouracil
  modified_base 3122: mod_base = OTHER; note = N1-methylpseudouracil
  modified_base 3124: mod_base = OTHER; note = N1-methylpseudouracil
  modified_base 3125: mod_base = OTHER; note = N1-methylpseudouracil
  modified_base 3128: mod_base = OTHER; note = N1-methylpseudouracil
  modified_base 3137: mod_base = OTHER; note = N1-methylpseudouracil
  modified_base 3143: mod_base = OTHER; note = N1-methylpseudouracil
  modified_base 3146: mod_base = OTHER; note = N1-methylpseudouracil
  modified_base 3149: mod_base = OTHER; note = N1-methylpseudouracil
  modified_base 3154: mod_base = OTHER; note = N1-methylpseudouracil
  modified_base 3155: mod_base = OTHER; note = N1-methylpseudouracil
  modified_base 3158: mod_base = OTHER; note = N1-methylpseudouracil
  modified_base 3161: mod_base = OTHER; note = N1-methylpseudouracil
  modified_base 3164: mod_base = OTHER; note = N1-methylpseudouracil
  modified_base 3172: mod_base = OTHER; note = N1-methylpseudouracil
  modified_base 3175: mod_base = OTHER; note = N1-methylpseudouracil
  modified_base 3176: mod_base = OTHER; note = N1-methylpseudouracil
  modified_base 3179: mod_base = OTHER; note = N1-methylpseudouracil
  modified_base 3187: mod_base = OTHER; note = N1-methylpseudouracil
  modified_base 3197: mod_base = OTHER; note = N1-methylpseudouracil
  modified_base 3206: mod_base = OTHER; note = N1-methylpseudouracil
  modified_base 3230: mod_base = OTHER; note = N1-methylpseudouracil
  modified_base 3232: mod_base = OTHER; note = N1-methylpseudouracil
  modified_base 3233: mod_base = OTHER; note = N1-methylpseudouracil
  modified_base 3242: mod_base = OTHER; note = N1-methylpseudouracil
  modified_base 3245: mod_base = OTHER; note = N1-methylpseudouracil
  modified_base 3249: mod_base = OTHER; note = N1-methylpseudouracil
  modified_base 3254: mod_base = OTHER; note = N1-methylpseudouracil
  modified_base 3263: mod_base = OTHER; note = N1-methylpseudouracil
  modified_base 3265: mod_base = OTHER; note = N1-methylpseudouracil
  modified_base 3272: mod_base = OTHER; note = N1-methylpseudouracil
  modified_base 3280: mod_base = OTHER; note = N1-methylpseudouracil
  modified_base 3281: mod_base = OTHER; note = N1-methylpseudouracil
  modified_base 3295: mod_base = OTHER; note = N1-methylpseudouracil
  modified_base 3298: mod_base = OTHER; note = N1-methylpseudouracil
  modified_base 3299: mod_base = OTHER; note = N1-methylpseudouracil
  modified_base 3308: mod_base = OTHER; note = N1-methylpseudouracil
  modified_base 3310: mod_base = OTHER; note = N1-methylpseudouracil
  modified_base 3311: mod_base = OTHER; note = N1-methylpseudouracil
  modified_base 3321: mod_base = OTHER; note = N1-methylpseudouracil
  modified_base 3323: mod_base = OTHER; note = N1-methylpseudouracil
  modified_base 3329: mod_base = OTHER; note = N1-methylpseudouracil
  modified_base 3343: mod_base = OTHER; note = N1-methylpseudouracil
  modified_base 3346: mod_base = OTHER; note = N1-methylpseudouracil
  modified_base 3347: mod_base = OTHER; note = N1-methylpseudouracil
  modified_base 3350: mod_base = OTHER; note = N1-methylpseudouracil
  modified_base 3352: mod_base = OTHER; note = N1-methylpseudouracil
  modified_base 3356: mod_base = OTHER; note = N1-methylpseudouracil
  modified_base 3365: mod_base = OTHER; note = N1-methylpseudouracil
  modified_base 3370: mod_base = OTHER; note = N1-methylpseudouracil
  modified_base 3373: mod_base = OTHER; note = N1-methylpseudouracil
  modified_base 3374: mod_base = OTHER; note = N1-methylpseudouracil
  modified_base 3380: mod_base = OTHER; note = N1-methylpseudouracil
  modified_base 3386: mod_base = OTHER; note = N1-methylpseudouracil
  modified_base 3392: mod_base = OTHER; note = N1-methylpseudouracil
  modified_base 3395: mod_base = OTHER; note = N1-methylpseudouracil
  modified_base 3397: mod_base = OTHER; note = N1-methylpseudouracil
  modified_base 3398: mod_base = OTHER; note = N1-methylpseudouracil
  modified_base 3401: mod_base = OTHER; note = N1-methylpseudouracil
  modified_base 3404: mod_base = OTHER; note = N1-methylpseudouracil
  modified_base 3406: mod_base = OTHER; note = N1-methylpseudouracil
  modified_base 3407: mod_base = OTHER; note = N1-methylpseudouracil
  modified_base 3409: mod_base = OTHER; note = N1-methylpseudouracil
  modified_base 3410: mod_base = OTHER; note = N1-methylpseudouracil
  modified_base 3413: mod_base = OTHER; note = N1-methylpseudouracil
  modified_base 3419: mod_base = OTHER; note = N1-methylpseudouracil
  modified_base 3424: mod_base = OTHER; note = N1-methylpseudouracil
  modified_base 3425: mod_base = OTHER; note = N1-methylpseudouracil
  modified_base 3428: mod_base = OTHER; note = N1-methylpseudouracil
  modified_base 3430: mod_base = OTHER; note = N1-methylpseudouracil
  modified_base 3434: mod_base = OTHER; note = N1-methylpseudouracil
  modified_base 3437: mod_base = OTHER; note = N1-methylpseudouracil
  modified_base 3464: mod_base = OTHER; note = N1-methylpseudouracil
  modified_base 3470: mod_base = OTHER; note = N1-methylpseudouracil
  modified_base 3473: mod_base = OTHER; note = N1-methylpseudouracil
  modified_base 3476: mod_base = OTHER; note = N1-methylpseudouracil
  modified_base 3482: mod_base = OTHER; note = N1-methylpseudouracil
  modified_base 3488: mod_base = OTHER; note = N1-methylpseudouracil
  modified_base 3492: mod_base = OTHER; note = N1-methylpseudouracil
  modified_base 3494: mod_base = OTHER; note = N1-methylpseudouracil
  modified_base 3497: mod_base = OTHER; note = N1-methylpseudouracil
  modified_base 3506: mod_base = OTHER; note = N1-methylpseudouracil
  modified_base 3511: mod_base = OTHER; note = N1-methylpseudouracil
  modified_base 3518: mod_base = OTHER; note = N1-methylpseudouracil
  modified_base 3530: mod_base = OTHER; note = N1-methylpseudouracil
  modified_base 3536: mod_base = OTHER; note = N1-methylpseudouracil
  modified_base 3545: mod_base = OTHER; note = N1-methylpseudouracil
  modified_base 3548: mod_base = OTHER; note = N1-methylpseudouracil
  modified_base 3553: mod_base = OTHER; note = N1-methylpseudouracil
  modified_base 3557: mod_base = OTHER; note = N1-methylpseudouracil
  modified_base 3559: mod_base = OTHER; note = N1-methylpseudouracil
  modified_base 3566: mod_base = OTHER; note = N1-methylpseudouracil
  modified_base 3568: mod_base = OTHER; note = N1-methylpseudouracil
  modified_base 3569: mod_base = OTHER; note = N1-methylpseudouracil
  modified_base 3574: mod_base = OTHER; note = N1-methylpseudouracil
  modified_base 3575: mod_base = OTHER; note = N1-methylpseudouracil
  modified_base 3578: mod_base = OTHER; note = N1-methylpseudouracil
  modified_base 3584: mod_base = OTHER; note = N1-methylpseudouracil
  modified_base 3622: mod_base = OTHER; note = N1-methylpseudouracil
  modified_base 3638: mod_base = OTHER; note = N1-methylpseudouracil
  modified_base 3647: mod_base = OTHER; note = N1-methylpseudouracil
  modified_base 3650: mod_base = OTHER; note = N1-methylpseudouracil
  modified_base 3653: mod_base = OTHER; note = N1-methylpseudouracil
  modified_base 3654: mod_base = OTHER; note = N1-methylpseudouracil
  modified_base 3656: mod_base = OTHER; note = N1-methylpseudouracil
  modified_base 3671: mod_base = OTHER; note = N1-methylpseudouracil
  modified_base 3686: mod_base = OTHER; note = N1-methylpseudouracil
  modified_base 3688: mod_base = OTHER; note = N1-methylpseudouracil
  modified_base 3693: mod_base = OTHER; note = N1-methylpseudouracil
  modified_base 3694: mod_base = OTHER; note = N1-methylpseudouracil
  modified_base 3707: mod_base = OTHER; note = N1-methylpseudouracil
  modified_base 3713: mod_base = OTHER; note = N1-methylpseudouracil
  modified_base 3722: mod_base = OTHER; note = N1-methylpseudouracil
  modified_base 3733: mod_base = OTHER; note = N1-methylpseudouracil
  modified_base 3755: mod_base = OTHER; note = N1-methylpseudouracil
  modified_base 3758: mod_base = OTHER; note = N1-methylpseudouracil
  modified_base 3767: mod_base = OTHER; note = N1-methylpseudouracil
  modified_base 3772: mod_base = OTHER; note = N1-methylpseudouracil
  modified_base 3773: mod_base = OTHER; note = N1-methylpseudouracil
  modified_base 3775: mod_base = OTHER; note = N1-methylpseudouracil
  modified_base 3779: mod_base = OTHER; note = N1-methylpseudouracil
  modified_base 3780: mod_base = OTHER; note = N1-methylpseudouracil
  modified_base 3786: mod_base = OTHER; note = N1-methylpseudouracil
  modified_base 3797: mod_base = OTHER; note = N1-methylpseudouracil
  modified_base 3803: mod_base = OTHER; note = N1-methylpseudouracil
  modified_base 3805: mod_base = OTHER; note = N1-methylpseudouracil
  modified_base 3806: mod_base = OTHER; note = N1-methylpseudouracil
  modified_base 3822: mod_base = OTHER; note = N1-methylpseudouracil
  modified_base 3836: mod_base = OTHER; note = N1-methylpseudouracil
  modified_base 3839: mod_base = OTHER; note = N1-methylpseudouracil
  modified_base 3841: mod_base = OTHER; note = N1-methylpseudouracil
  modified_base 3847: mod_base = OTHER; note = N1-methylpseudouracil
  modified_base 3848: mod_base = OTHER; note = N1-methylpseudouracil
  modified_base 3851: mod_base = OTHER; note = N1-methylpseudouracil
  modified_base 3857: mod_base = OTHER; note = N1-methylpseudouracil
  modified_base 3860: mod_base = OTHER; note = N1-methylpseudouracil
  modified_base 3878: mod_base = OTHER; note = N1-methylpseudouracil
  modified_base 3884: mod_base = OTHER; note = N1-methylpseudouracil
  modified_base 3893: mod_base = OTHER; note = N1-methylpseudouracil
  modified_base 3898: mod_base = OTHER; note = N1-methylpseudouracil
  modified_base 3908: mod_base = OTHER; note = N1-methylpseudouracil
  modified_base 3914: mod_base = OTHER; note = N1-methylpseudouracil
  modified_base 3922: mod_base = OTHER; note = N1-methylpseudouracil
  modified_base 3934: mod_base = OTHER; note = N1-methylpseudouracil
  modified_base 3935: mod_base = OTHER; note = N1-methylpseudouracil
  modified_base 3941: mod_base = OTHER; note = N1-methylpseudouracil
  modified_base 3944: mod_base = OTHER; note = N1-methylpseudouracil
  modified_base 3956: mod_base = OTHER; note = N1-methylpseudouracil
  modified_base 3958: mod_base = OTHER; note = N1-methylpseudouracil
  modified_base 3959: mod_base = OTHER; note = N1-methylpseudouracil
  modified_base 3960: mod_base = OTHER; note = N1-methylpseudouracil
  modified_base 3962: mod_base = OTHER; note = N1-methylpseudouracil
  modified_base 3963: mod_base = OTHER; note = N1-methylpseudouracil
  modified_base 3964: mod_base = OTHER; note = N1-methylpseudouracil
  modified_base 3965: mod_base = OTHER; note = N1-methylpseudouracil
  modified_base 3967: mod_base = OTHER; note = N1-methylpseudouracil
  modified_base 3969: mod_base = OTHER; note = N1-methylpseudouracil
  modified_base 3976: mod_base = OTHER; note = N1-methylpseudouracil
  modified_base 3977: mod_base = OTHER; note = N1-methylpseudouracil
  modified_base 3978: mod_base = OTHER; note = N1-methylpseudouracil
  modified_base 3989: mod_base = OTHER; note = N1-methylpseudouracil
  modified_base 3997: mod_base = OTHER; note = N1-methylpseudouracil
  modified_base 4006: mod_base = OTHER; note = N1-methylpseudouracil
  modified_base 4009: mod_base = OTHER; note = N1-methylpseudouracil
  modified_base 4022: mod_base = OTHER; note = N1-methylpseudouracil
  modified_base 4024: mod_base = OTHER; note = N1-methylpseudouracil
  modified_base 4031: mod_base = OTHER; note = N1-methylpseudouracil
  modified_base 4043: mod_base = OTHER; note = N1-methylpseudouracil
  modified_base 4049: mod_base = OTHER; note = N1-methylpseudouracil
  modified_base 4054: mod_base = OTHER; note = N1-methylpseudouracil
  modified_base 4058: mod_base = OTHER; note = N1-methylpseudouracil
  modified_base 4061: mod_base = OTHER; note = N1-methylpseudouracil
  modified_base 4069: mod_base = OTHER; note = N1-methylpseudouracil
  modified_base 4070: mod_base = OTHER; note = N1-methylpseudouracil
  modified_base 4082: mod_base = OTHER; note = N1-methylpseudouracil
  modified_base 4087: mod_base = OTHER; note = N1-methylpseudouracil
  modified_base 4088: mod_base = OTHER; note = N1-methylpseudouracil
  modified_base 4091: mod_base = OTHER; note = N1-methylpseudouracil
  modified_base 4094: mod_base = OTHER; note = N1-methylpseudouracil
  modified_base 4097: mod_base = OTHER; note = N1-methylpseudouracil
  modified_base 4108: mod_base = OTHER; note = N1-methylpseudouracil
  modified_base 4112: mod_base = OTHER; note = N1-methylpseudouracil
  modified_base 4115: mod_base = OTHER; note = N1-methylpseudouracil
  modified_base 4136: mod_base = OTHER; note = N1-methylpseudouracil
  modified_base 4139: mod_base = OTHER; note = N1-methylpseudouracil
  modified_base 4141: mod_base = OTHER; note = N1-methylpseudouracil
  modified_base 4145: mod_base = OTHER; note = N1-methylpseudouracil
  modified_base 4157: mod_base = OTHER; note = N1-methylpseudouracil
  modified_base 4160: mod_base = OTHER; note = N1-methylpseudouracil
  modified_base 4175: mod_base = OTHER; note = N1-methylpseudouracil
  modified_base 4178: mod_base = OTHER; note = N1-methylpseudouracil
  modified_base 4181: mod_base = OTHER; note = N1-methylpseudouracil
  modified_base 4184: mod_base = OTHER; note = N1-methylpseudouracil
  modified_base 4195: mod_base = OTHER; note = N1-methylpseudouracil
  modified_base 4205: mod_base = OTHER; note = N1-methylpseudouracil
  modified_base 4209: mod_base = OTHER; note = N1-methylpseudouracil
  modified_base 4214: mod_base = OTHER; note = N1-methylpseudouracil
  modified_base 4219: mod_base = OTHER; note = N1-methylpseudouracil
  modified_base 4226: mod_base = OTHER; note = N1-methylpseudouracil
  modified_base 4229: mod_base = OTHER; note = N1-methylpseudouracil
  modified_base 4241: mod_base = OTHER; note = N1-methylpseudouracil
  modified_base 4252: mod_base = OTHER; note = N1-methylpseudouracil
  modified_base 4253: mod_base = OTHER; note = N1-methylpseudouracil
  modified_base 4261: mod_base = OTHER; note = N1-methylpseudouracil
  modified_base 4268: mod_base = OTHER; note = N1-methylpseudouracil
  modified_base 4271: mod_base = OTHER; note = N1-methylpseudouracil
  modified_base 4274: mod_base = OTHER; note = N1-methylpseudouracil
  modified_base 4276: mod_base = OTHER; note = N1-methylpseudouracil
  modified_base 4289: mod_base = OTHER; note = N1-methylpseudouracil
  modified_base 4296: mod_base = OTHER; note = N1-methylpseudouracil
  modified_base 4298: mod_base = OTHER; note = N1-methylpseudouracil
  modified_base 4301: mod_base = OTHER; note = N1-methylpseudouracil
  modified_base 4306: mod_base = OTHER; note = N1-methylpseudouracil
  modified_base 4315: mod_base = OTHER; note = N1-methylpseudouracil
  modified_base 4316: mod_base = OTHER; note = N1-methylpseudouracil
  modified_base 4319: mod_base = OTHER; note = N1-methylpseudouracil
  modified_base 4322: mod_base = OTHER; note = N1-methylpseudouracil
  modified_base 4325: mod_base = OTHER; note = N1-methylpseudouracil
  modified_base 4340: mod_base = OTHER; note = N1-methylpseudouracil
  modified_base 4348: mod_base = OTHER; note = N1-methylpseudouracil
  modified_base 4354: mod_base = OTHER; note = N1-methylpseudouracil
  modified_base 4358: mod_base = OTHER; note = N1-methylpseudouracil
  modified_base 4367: mod_base = OTHER; note = N1-methylpseudouracil
  modified_base 4370: mod_base = OTHER; note = N1-methylpseudouracil
  modified_base 4385: mod_base = OTHER; note = N1-methylpseudouracil
  modified_base 4387: mod_base = OTHER; note = N1-methylpseudouracil
  modified_base 4388: mod_base = OTHER; note = N1-methylpseudouracil
  modified_base 4398: mod_base = OTHER; note = N1-methylpseudouracil
  modified_base 4400: mod_base = OTHER; note = N1-methylpseudouracil
  modified_base 4402: mod_base = OTHER; note = N1-methylpseudouracil
  modified_base 4404: mod_base = OTHER; note = N1-methylpseudouracil
  modified_base 4413: mod_base = OTHER; note = N1-methylpseudouracil
  modified_base 4418: mod_base = OTHER; note = N1-methylpseudouracil
  modified_base 4424: mod_base = OTHER; note = N1-methylpseudouracil
  modified_base 4426: mod_base = OTHER; note = N1-methylpseudouracil
  modified_base 4427: mod_base = OTHER; note = N1-methylpseudouracil
  modified_base 4431: mod_base = OTHER; note = N1-methylpseudouracil
  modified_base 4450: mod_base = OTHER; note = N1-methylpseudouracil
  modified_base 4456: mod_base = OTHER; note = N1-methylpseudouracil
  modified_base 4458: mod_base = OTHER; note = N1-methylpseudouracil
  modified_base 4469: mod_base = OTHER; note = N1-methylpseudouracil
  modified_base 4478: mod_base = OTHER; note = N1-methylpseudouracil
  modified_base 4502: mod_base = OTHER; note = N1-methylpseudouracil
  modified_base 4509: mod_base = OTHER; note = N1-methylpseudouracil
  modified_base 4517: mod_base = OTHER; note = N1-methylpseudouracil
  modified_base 4519: mod_base = OTHER; note = N1-methylpseudouracil
  modified_base 4525: mod_base = OTHER; note = N1-methylpseudouracil
  modified_base 4537: mod_base = OTHER; note = N1-methylpseudouracil
  modified_base 4546: mod_base = OTHER; note = N1-methylpseudouracil
  modified_base 4547: mod_base = OTHER; note = N1-methylpseudouracil
  modified_base 4549: mod_base = OTHER; note = N1-methylpseudouracil
  modified_base 4553: mod_base = OTHER; note = N1-methylpseudouracil
  modified_base 4554: mod_base = OTHER; note = N1-methylpseudouracil
  modified_base 4557: mod_base = OTHER; note = N1-methylpseudouracil
  modified_base 4560: mod_base = OTHER; note = N1-methylpseudouracil
  modified_base 4565: mod_base = OTHER; note = N1-methylpseudouracil
  modified_base 4568: mod_base = OTHER; note = N1-methylpseudouracil
  modified_base 4571: mod_base = OTHER; note = N1-methylpseudouracil
  modified_base 4582: mod_base = OTHER; note = N1-methylpseudouracil
  modified_base 4590: mod_base = OTHER; note = N1-methylpseudouracil
  modified_base 4598: mod_base = OTHER; note = N1-methylpseudouracil
  modified_base 4601: mod_base = OTHER; note = N1-methylpseudouracil
  modified_base 4603: mod_base = OTHER; note = N1-methylpseudouracil
  modified_base 4604: mod_base = OTHER; note = N1-methylpseudouracil
  modified_base 4605: mod_base = OTHER; note = N1-methylpseudouracil
  modified_base 4609: mod_base = OTHER; note = N1-methylpseudouracil
  modified_base 4614: mod_base = OTHER; note = N1-methylpseudouracil
  modified_base 4616: mod_base = OTHER; note = N1-methylpseudouracil
  modified_base 4620: mod_base = OTHER; note = N1-methylpseudouracil
ggaggaaatcgcaaaatttgctcttcgcgttagatttcttttagttttctcgcaactagcaagctttttgttctcgccatgcagcggagccctctggagaaggccagcgtggtgagcaagctgttcttcagctggaccaggcccatcctgcgaaagggctacagacagaggctggagctgtccgacatctaccagattccatccgtggacagcgccgacaatctgagcgagaagctggagagggagtgggaccgcgagctggccagcaagaagaaccctaagctgatcaacgccctgcgccgctgcttcttctggaggttcatgttctacggcatcttcctgtacctgggcgaggtgaccaaggccgtccagcctctgctgctgggccgcatcatcgccagctacgatcccgacaacaaggaggaacgctccatcgccatctacctgggcatcggcctgtgtctgctgttcatcgtgcggaccctgctgctgcaccccgccatcttcggcctgcatcacatcggcatgcagatgaggatcgccatgttctccctgatctacaagaagaccctgaagctgtccagccgcgtgctggataagatcagcatcgggcagctggtgagcctgctgagcaacaacctgaacaagttcgacgaggggttggcgctggcccacttcgtgtggattgccccgctgcaggtggctctgctgatggggctgatctgggagctgctgcaggcctctgccttctgcgggctggggtttctgatcgtgctggccctgttccaagctggcctgggccgcatgatgatgaagtaccgcgatcagagggccggcaagatcagcgagcgcctggtgatcactagcgagatgatagagaacatccagagcgtgaaggcttactgttgggaggaggccatggagaagatgatcgagaacctgaggcagaccgagctgaagctgactagaaaggcagcctacgtgaggtatttcaactccagcgccttcttcttcagcggcttcttcgtggtgttcctgagcgtgctgccctacgccctgatcaagggcatcatcctgaggaagatcttcaccaccattagcttctgcatcgtgctgcgcatggccgtgaccaggcagttcccttgggccgtgcagacttggtacgacagcctgggagccatcaacaagatccaggactttctgcagaagcaggaatataagaccctggagtacaacctgaccaccaccgaggtggtgatggagaacgtgaccgccttctgggaggagggcttcggcgagctgttcgagaaggccaagcagaacaataacaaccgcaagaccagcaacggcgacgactccctcttcttcagcaactttagcctgctgggcacccctgtgctgaaggacatcaacttcaagatcgaaagaggccaactgctggccgtggccggatctaccggcgccggcaagaccagcctgctgatgatgatcatgggcgagctggagcccagcgagggcaagatcaagcacagcggccggatctccttctgctcccagttctcctggatcatgcccggcaccatcaaggagaacatcatcttcggcgtgagctacgacgagtacaggtaccggagcgtgatcaaggcctgccagctggaggaggacatctccaaatttgccgagaaggacaacattgtgctgggcgaaggcgggatcaccctgtccggtggccagcgtgcacgcatctccctggcccgggctgtgtacaaggacgccgacctgtacctgctggacagcccttttggctacctggacgtgctgaccgagaaggagatcttcgagtcctgcgtgtgtaagctgatggccaacaagaccagaatcctggtgaccagcaagatggagcatctgaagaaggccgacaagatcctgatcctgcacgaggggtccagctacttctacggcaccttcagcgagctgcagaacctgcagcccgacttcagctccaagctgatgggctgcgatagcttcgaccagttctccgccgagagaaggaactccattctgaccgagaccctgcaccgattctccctggagggagacgccccagtgagctggaccgagaccaagaagcagagcttcaagcagaccggcgagttcggagagaagcgcaagaactccatcctcaaccccatcaacagcatccggaagttcagcatcgtgcagaagacccctctgcagatgaacgggatcgaggaggacagcgacgagcccctggaacggcgactgtccctcgtgcccgacagcgagcagggcgaggccatcctgccccggatctccgtgatctccactgggcccaccctgcaagcccgacggcggcaaagcgtgctgaacctgatgacccacagcgtgaaccagggccagaatatccaccgcaagactacagccagcacccgcaaggtgagcctggctccccaggccaacctgaccgagctggacatctacagcaggaggctgagccaggagacaggcctggagatcagcgaggagatcaacgaggaggacctgaaggagtgcttcttcgacgacatggagtccatccccgccgtgaccacctggaacacctacctgagatacatcaccgtgcacaagagcctgatcttcgtgctgatctggtgcctggtgatcttcttggccgaggtagccgcctcactggtggtgctgtggctgctgggcaataccccactgcaggacaaggggaactccacccacagccggaacaacagctacgccgtgatcatcacctccaccagcagctactacgtgttctacatctacgtgggcgtggccgacacactgctggccatgggcttcttcagaggcctccctctggtgcacacactgatcaccgtgagcaagatcctgcaccacaagatgctgcacagcgtgctgcaggctcccatgtcaaccctgaacaccctgaaggccggcggcatcctgaacaggttcagcaaggacatcgccattctggacgatctgctgcccctgaccatcttcgacttcatccagctgctgctgatcgtgatcggggccatcgccgtggtggccgtgctgcagccctacatcttcgtggccacagtgcccgtgatcgtggccttcatcatgctgcgcgcctacttcctgcagacctcccagcagctgaagcagctggagagcgaaggccgcagccccatcttcacccacctggtgactagcctgaaggggctgtggaccctgcgcgccttcggcaggcagccctacttcgagaccctgttccacaaggctctgaacctgcacaccgccaactggttcctgtacctcagcaccctgcgctggttccagatgcggatcgagatgatcttcgtgatcttcttcatcgccgtgaccttcatctccatcctgaccaccggggaaggcgagggacgggtgggaatcatcctgaccctggccatgaatatcatgagcaccctgcagtgggccgtgaacagcagcatcgacgtggacagcctgatgcggtccgtgtcccgggtgttcaagttcatcgacatgcccaccgagggcaagcccaccaagagcaccaagccctacaagaacggccagctgagcaaggtgatgattatcgagaacagccacgtgaagaaggacgacatctggccttccggcggccagatgaccgtgaaggacctgaccgccaagtacaccgagggcggcaacgccatcctggagaacatcagcttctccattagccctggacagcgggtgggcctgttgggacggaccggcagtgggaagagcaccctgctgtccgccttcctgcggctgctgaacacggagggcgagatccagatcgacggggtgagctgggacagcatcaccctgcagcagtggcgaaaggccttcggcgtgatcccacagaaggtgtttattttctctggcacctttaggaagaacctggacccctacgagcagtggtccgaccaggagatctggaaggtggccgacgaggtgggcctgcggtcagtgatcgagcagttccccggcaagctggacttcgtgctggtggacggcggctgcgtgctgagccacggccacaagcagctgatgtgcctggcacgcagcgtgctgagcaaggccaagatcctgctgctggacgagccctccgcgcacctggatcccgtgacctaccagatcatcaggcggaccctgaagcaggccttcgccgactgcaccgtgatcctgtgcgagcacagaatcgaggctatgctggagtgccagcagttcctggtgatcgaggagaacaaggtgcggcagtacgactccatccagaagctgctgaacgagcgcagcctgttcagacaggctatctctcccagcgatcgcgtgaagctgttccctcacaggaacagcagcaagtgcaagtctaagccacagatcgccgccctgaaggaggagaccgaggaggaggtgcaggatacccgcctgtaaagctccccgggggcctccaccgcgttatccgttcctcgtaggctggtcctggggaacgggtcggcgggtacccccgtggtctttgaataaagtctgagtgggcggcaaaaaaaaaaaaaaaaaaaaaaaaaaaaaaaaaaaaaaaaaaaaaaaaaaaaaaaaaaaaaaaaaaaaaaaaaaaaaaaaaaaaaaaaaaaaaaaaaaaa

SEQ ID NO: 14 - RNA, 4756 nt, synthetic construct
  source 1..4756: mol_type = other RNA
  modified_base 1: mod_base = OTHER; note = 7-Methylguanosine with triphosphate linkage
  modified_base 2: mod_base = OTHER; note = 2'-O-methyl modified nucleotide
  modified_base 9: mod_base = OTHER; note = N1-methylpseudouracil
  modified_base 10: mod_base = OTHER; note = N1-methylpseudouracil
  modified_base 11: mod_base = OTHER; note = N1-methylpseudouracil
  modified_base 12: mod_base = OTHER; note = N1-methylpseudouracil
  modified_base 13: mod_base = OTHER; note = N1-methylpseudouracil
  modified_base 14: mod_base = OTHER; note = N1-methylpseudouracil
  modified_base 15: mod_base = OTHER; note = N1-methylpseudouracil
  modified_base 16: mod_base = OTHER; note = N1-methylpseudouracil
  modified_base 17: mod_base = OTHER; note = N1-methylpseudouracil
  modified_base 20: mod_base = OTHER; note = N1-methylpseudouracil
  modified_base 22: mod_base = OTHER; note = N1-methylpseudouracil
  modified_base 23: mod_base = OTHER; note = N1-methylpseudouracil
  modified_base 25: mod_base = OTHER; note = N1-methylpseudouracil
  modified_base 31: mod_base = OTHER; note = N1-methylpseudouracil
  modified_base 32: mod_base = OTHER; note = N1-methylpseudouracil
  modified_base 33: mod_base = OTHER; note = N1-methylpseudouracil
  modified_base 34: mod_base = OTHER; note = N1-methylpseudouracil
  modified_base 35: mod_base = OTHER; note = N1-methylpseudouracil
  modified_base 36: mod_base = OTHER; note = N1-methylpseudouracil
  modified_base 37: mod_base = OTHER; note = N1-methylpseudouracil
  modified_base 38: mod_base = OTHER; note = N1-methylpseudouracil
  modified_base 39: mod_base = OTHER; note = N1-methylpseudouracil
  modified_base 42: mod_base = OTHER; note = N1-methylpseudouracil
  modified_base 44: mod_base = OTHER; note = N1-methylpseudouracil
  modified_base 45: mod_base = OTHER; note = N1-methylpseudouracil
  modified_base 53: mod_base = OTHER; note = N1-methylpseudouracil
  modified_base 54: mod_base = OTHER; note = N1-methylpseudouracil
  modified_base 55: mod_base = OTHER; note = N1-methylpseudouracil
  modified_base 56: mod_base = OTHER; note = N1-methylpseudouracil
  modified_base 57: mod_base = OTHER; note = N1-methylpseudouracil
  modified_base 58: mod_base = OTHER; note = N1-methylpseudouracil
  modified_base 59: mod_base = OTHER; note = N1-methylpseudouracil
  modified_base 60: mod_base = OTHER; note = N1-methylpseudouracil
  modified_base 61: mod_base = OTHER; note = N1-methylpseudouracil
  modified_base 64: mod_base = OTHER; note = N1-methylpseudouracil
  modified_base 66: mod_base = OTHER; note = N1-methylpseudouracil
  modified_base 67: mod_base = OTHER; note = N1-methylpseudouracil
  modified_base 75: mod_base = OTHER; note = N1-methylpseudouracil
  modified_base 85: mod_base = OTHER; note = N1-methylpseudouracil
  modified_base 87: mod_base = OTHER; note = N1-methylpseudouracil
  modified_base 109: mod_base = OTHER; note = N1-methylpseudouracil
  modified_base 122: mod_base = OTHER; note = N1-methylpseudouracil
  modified_base 124: mod_base = OTHER; note = N1-methylpseudouracil
  modified_base 139: mod_base = OTHER; note = N1-methylpseudouracil
  modified_base 142: mod_base = OTHER; note = N1-methylpseudouracil
  modified_base 151: mod_base = OTHER; note = N1-methylpseudouracil
  modified_base 153: mod_base = OTHER; note = N1-methylpseudouracil
  modified_base 154: mod_base = OTHER; note = N1-methylpseudouracil
  modified_base 156: mod_base = OTHER; note = N1-methylpseudouracil
  modified_base 157: mod_base = OTHER; note = N1-methylpseudouracil
  modified_base 162: mod_base = OTHER; note = N1-methylpseudouracil
  modified_base 175: mod_base = OTHER; note = N1-methylpseudouracil
  modified_base 178: mod_base = OTHER; note = N1-methylpseudouracil
  modified_base 189: mod_base = OTHER; note = N1-methylpseudouracil
  modified_base 202: mod_base = OTHER; note = N1-methylpseudouracil
  modified_base 208: mod_base = OTHER; note = N1-methylpseudouracil
  modified_base 210: mod_base = OTHER; note = N1-methylpseudouracil
  modified_base 217: mod_base = OTHER; note = N1-methylpseudouracil
  modified_base 219: mod_base = OTHER; note = N1-methylpseudouracil
  modified_base 226: mod_base = OTHER; note = N1-methylpseudouracil
  modified_base 227: mod_base = OTHER; note = N1-methylpseudouracil
  modified_base 231: mod_base = OTHER; note = N1-methylpseudouracil
  modified_base 235: mod_base = OTHER; note = N1-methylpseudouracil
  modified_base 251: mod_base = OTHER; note = N1-methylpseudouracil
  modified_base 253: mod_base = OTHER; note = N1-methylpseudouracil
  modified_base 265: mod_base = OTHER; note = N1-methylpseudouracil
  modified_base 276: mod_base = OTHER; note = N1-methylpseudouracil
  modified_base 289: mod_base = OTHER; note = N1-methylpseudouracil
  modified_base 308: mod_base = OTHER; note = N1-methylpseudouracil
  modified_base 313: mod_base = OTHER; note = N1-methylpseudouracil
  modified_base 316: mod_base = OTHER; note = N1-methylpseudouracil
  modified_base 325: mod_base = OTHER; note = N1-methylpseudouracil
  modified_base 333: mod_base = OTHER; note = N1-methylpseudouracil
  modified_base 336: mod_base = OTHER; note = N1-methylpseudouracil
  modified_base 337: mod_base = OTHER; note = N1-methylpseudouracil
  modified_base 339: mod_base = OTHER; note = N1-methylpseudouracil
  modified_base 340: mod_base = OTHER; note = N1-methylpseudouracil
  modified_base 342: mod_base = OTHER; note = N1-methylpseudouracil
  modified_base 348: mod_base = OTHER; note = N1-methylpseudouracil
  modified_base 349: mod_base = OTHER; note = N1-methylpseudouracil
  modified_base 352: mod_base = OTHER; note = N1-methylpseudouracil
  modified_base 354: mod_base = OTHER; note = N1-methylpseudouracil
  modified_base 355: mod_base = OTHER; note = N1-methylpseudouracil
  modified_base 357: mod_base = OTHER; note = N1-methylpseudouracil
  modified_base 364: mod_base = OTHER; note = N1-methylpseudouracil
  modified_base 366: mod_base = OTHER; note = N1-methylpseudouracil
  modified_base 367: mod_base = OTHER; note = N1-methylpseudouracil
  modified_base 370: mod_base = OTHER; note = N1-methylpseudouracil
  modified_base 372: mod_base = OTHER; note = N1-methylpseudouracil
  modified_base 376: mod_base = OTHER; note = N1-methylpseudouracil
  modified_base 385: mod_base = OTHER; note = N1-methylpseudouracil
  modified_base 397: mod_base = OTHER; note = N1-methylpseudouracil
  modified_base 404: mod_base = OTHER; note = N1-methylpseudouracil
  modified_base 406: mod_base = OTHER; note = N1-methylpseudouracil
  modified_base 409: mod_base = OTHER; note = N1-methylpseudouracil
  modified_base 412: mod_base = OTHER; note = N1-methylpseudouracil
  modified_base 421: mod_base = OTHER; note = N1-methylpseudouracil
  modified_base 424: mod_base = OTHER; note = N1-methylpseudouracil
  modified_base 432: mod_base = OTHER; note = N1-methylpseudouracil
  modified_base 437: mod_base = OTHER; note = N1-methylpseudouracil
  modified_base 459: mod_base = OTHER; note = N1-methylpseudouracil
  modified_base 463: mod_base = OTHER; note = N1-methylpseudouracil
  modified_base 469: mod_base = OTHER; note = N1-methylpseudouracil
  modified_base 471: mod_base = OTHER; note = N1-methylpseudouracil
  modified_base 475: mod_base = OTHER; note = N1-methylpseudouracil
  modified_base 481: mod_base = OTHER; note = N1-methylpseudouracil
  modified_base 487: mod_base = OTHER; note = N1-methylpseudouracil
  modified_base 489: mod_base = OTHER; note = N1-methylpseudouracil
  modified_base 491: mod_base = OTHER; note = N1-methylpseudouracil
  modified_base 493: mod_base = OTHER; note = N1-methylpseudouracil
  modified_base 496: mod_base = OTHER; note = N1-methylpseudouracil
  modified_base 498: mod_base = OTHER; note = N1-methylpseudouracil
  modified_base 499: mod_base = OTHER; note = N1-methylpseudouracil
  modified_base 502: mod_base = OTHER; note = N1-methylpseudouracil
  modified_base 505: mod_base = OTHER; note = N1-methylpseudouracil
  modified_base 514: mod_base = OTHER; note = N1-methylpseudouracil
  modified_base 517: mod_base = OTHER; note = N1-methylpseudouracil
  modified_base 520: mod_base = OTHER; note = N1-methylpseudouracil
  modified_base 532: mod_base = OTHER; note = N1-methylpseudouracil
  modified_base 534: mod_base = OTHER; note = N1-methylpseudouracil
  modified_base 535: mod_base = OTHER; note = N1-methylpseudouracil
  modified_base 541: mod_base = OTHER; note = N1-methylpseudouracil
  modified_base 545: mod_base = OTHER; note = N1-methylpseudouracil
  modified_base 550: mod_base = OTHER; note = N1-methylpseudouracil
  modified_base 556: mod_base = OTHER; note = N1-methylpseudouracil
  modified_base 562: mod_base = OTHER; note = N1-methylpseudouracil
  modified_base 568: mod_base = OTHER; note = N1-methylpseudouracil
  modified_base 574: mod_base = OTHER; note = N1-methylpseudouracil
  modified_base 576: mod_base = OTHER; note = N1-methylpseudouracil
  modified_base 577: mod_base = OTHER; note = N1-methylpseudouracil
  modified_base 579: mod_base = OTHER; note = N1-methylpseudouracil
  modified_base 583: mod_base = OTHER; note = N1-methylpseudouracil
  modified_base 586: mod_base = OTHER; note = N1-methylpseudouracil
  modified_base 588: mod_base = OTHER; note = N1-methylpseudouracil
  modified_base 601: mod_base = OTHER; note = N1-methylpseudouracil
  modified_base 607: mod_base = OTHER; note = N1-methylpseudouracil
  modified_base 609: mod_base = OTHER; note = N1-methylpseudouracil
  modified_base 619: mod_base = OTHER; note = N1-methylpseudouracil
  modified_base 622: mod_base = OTHER; note = N1-methylpseudouracil
  modified_base 626: mod_base = OTHER; note = N1-methylpseudouracil
  modified_base 631: mod_base = OTHER; note = N1-methylpseudouracil
  modified_base 637: mod_base = OTHER; note = N1-methylpseudouracil
  modified_base 646: mod_base = OTHER; note = N1-methylpseudouracil
  modified_base 649: mod_base = OTHER; note = N1-methylpseudouracil
  modified_base 655: mod_base = OTHER; note = N1-methylpseudouracil
  modified_base 658: mod_base = OTHER; note = N1-methylpseudouracil
  modified_base 670: mod_base = OTHER; note = N1-methylpseudouracil
  modified_base 678: mod_base = OTHER; note = N1-methylpseudouracil
  modified_base 679: mod_base = OTHER; note = N1-methylpseudouracil
  modified_base 690: mod_base = OTHER; note = N1-methylpseudouracil
  modified_base 691: mod_base = OTHER; note = N1-methylpseudouracil
  modified_base 697: mod_base = OTHER; note = N1-methylpseudouracil
  modified_base 705: mod_base = OTHER; note = N1-methylpseudouracil
  modified_base 706: mod_base = OTHER; note = N1-methylpseudouracil
  modified_base 709: mod_base = OTHER; note = N1-methylpseudouracil
  modified_base 711: mod_base = OTHER; note = N1-methylpseudouracil
  modified_base 715: mod_base = OTHER; note = N1-methylpseudouracil
  modified_base 716: mod_base = OTHER; note = N1-methylpseudouracil
  modified_base 724: mod_base = OTHER; note = N1-methylpseudouracil
  modified_base 730: mod_base = OTHER; note = N1-methylpseudouracil
  modified_base 734: mod_base = OTHER; note = N1-methylpseudouracil
  modified_base 736: mod_base = OTHER; note = N1-methylpseudouracil
  modified_base 739: mod_base = OTHER; note = N1-methylpseudouracil
  modified_base 742: mod_base = OTHER; note = N1-methylpseudouracil
  modified_base 748: mod_base = OTHER; note = N1-methylpseudouracil
  modified_base 751: mod_base = OTHER; note = N1-methylpseudouracil
  modified_base 753: mod_base = OTHER; note = N1-methylpseudouracil
  modified_base 760: mod_base = OTHER; note = N1-methylpseudouracil
  modified_base 763: mod_base = OTHER; note = N1-methylpseudouracil
  modified_base 771: mod_base = OTHER; note = N1-methylpseudouracil
  modified_base 773: mod_base = OTHER; note = N1-methylpseudouracil
  modified_base 777: mod_base = OTHER; note = N1-methylpseudouracil
  modified_base 778: mod_base = OTHER; note = N1-methylpseudouracil
  modified_base 780: mod_base = OTHER; note = N1-methylpseudouracil
  modified_base 787: mod_base = OTHER; note = N1-methylpseudouracil
  modified_base 792: mod_base = OTHER; note = N1-methylpseudouracil
  modified_base 793: mod_base = OTHER; note = N1-methylpseudouracil
  modified_base 794: mod_base = OTHER; note = N1-methylpseudouracil
  modified_base 796: mod_base = OTHER; note = N1-methylpseudouracil
  modified_base 799: mod_base = OTHER; note = N1-methylpseudouracil
  modified_base 802: mod_base = OTHER; note = N1-methylpseudouracil
  modified_base 805: mod_base = OTHER; note = N1-methylpseudouracil
  modified_base 811: mod_base = OTHER; note = N1-methylpseudouracil
  modified_base 813: mod_base = OTHER; note = N1-methylpseudouracil
  modified_base 814: mod_base = OTHER; note = N1-methylpseudouracil
  modified_base 821: mod_base = OTHER; note = N1-methylpseudouracil
  modified_base 826: mod_base = OTHER; note = N1-methylpseudouracil
  modified_base 835: mod_base = OTHER; note = N1-methylpseudouracil
  modified_base 838: mod_base = OTHER; note = N1-methylpseudouracil
  modified_base 841: mod_base = OTHER; note = N1-methylpseudouracil
  modified_base 846: mod_base = OTHER; note = N1-methylpseudouracil
  modified_base 854: mod_base = OTHER; note = N1-methylpseudouracil
  modified_base 871: mod_base = OTHER; note = N1-methylpseudouracil
  modified_base 883: mod_base = OTHER; note = N1-methylpseudouracil
  modified_base 886: mod_base = OTHER; note = N1-methylpseudouracil
  modified_base 889: mod_base = OTHER; note = N1-methylpseudouracil
  modified_base 893: mod_base = OTHER; note = N1-methylpseudouracil
  modified_base 901: mod_base = OTHER; note = N1-methylpseudouracil
  modified_base 904: mod_base = OTHER; note = N1-methylpseudouracil
  modified_base 913: mod_base = OTHER; note = N1-methylpseudouracil
  modified_base 922: mod_base = OTHER; note = N1-methylpseudouracil
  modified_base 929: mod_base = OTHER; note = N1-methylpseudouracil
  modified_base 930: mod_base = OTHER; note = N1-methylpseudouracil
  modified_base 933: mod_base = OTHER; note = N1-methylpseudouracil
  modified_base 935: mod_base = OTHER; note = N1-methylpseudouracil
  modified_base 936: mod_base = OTHER; note = N1-methylpseudouracil
  modified_base 949: mod_base = OTHER; note = N1-methylpseudouracil
  modified_base 958: mod_base = OTHER; note = N1-methylpseudouracil
  modified_base 961: mod_base = OTHER; note = N1-methylpseudouracil
  modified_base 970: mod_base = OTHER; note = N1-methylpseudouracil
  modified_base 985: mod_base = OTHER; note = N1-methylpseudouracil
  modified_base 991: mod_base = OTHER; note = N1-methylpseudouracil
  modified_base 995: mod_base = OTHER; note = N1-methylpseudouracil
  modified_base 1008: mod_base = OTHER; note = N1-methylpseudouracil
  modified_base 1012: mod_base = OTHER; note = N1-methylpseudouracil
  modified_base 1017: mod_base = OTHER; note = N1-methylpseudouracil
  modified_base 1019: mod_base = OTHER; note = N1-methylpseudouracil
  modified_base 1020: mod_base = OTHER; note = N1-methylpseudouracil
  modified_base 1021: mod_base = OTHER; note = N1-methylpseudouracil
  modified_base 1026: mod_base = OTHER; note = N1-methylpseudouracil
  modified_base 1035: mod_base = OTHER; note = N1-methylpseudouracil
  modified_base 1036: mod_base = OTHER; note = N1-methylpseudouracil
  modified_base 1038: mod_base = OTHER; note = N1-methylpseudouracil
  modified_base 1039: mod_base = OTHER; note = N1-methylpseudouracil
  modified_base 1041: mod_base = OTHER; note = N1-methylpseudouracil
  modified_base 1042: mod_base = OTHER; note = N1-methylpseudouracil
  modified_base 1050: mod_base = OTHER; note = N1-methylpseudouracil
  modified_base 1051: mod_base = OTHER; note = N1-methylpseudouracil
  modified_base 1053: mod_base = OTHER; note = N1-methylpseudouracil
  modified_base 1054: mod_base = OTHER; note = N1-methylpseudouracil
  modified_base 1057: mod_base = OTHER; note = N1-methylpseudouracil
  modified_base 1060: mod_base = OTHER; note = N1-methylpseudouracil
  modified_base 1062: mod_base = OTHER; note = N1-methylpseudouracil
  modified_base 1063: mod_base = OTHER; note = N1-methylpseudouracil
  modified_base 1066: mod_base = OTHER; note = N1-methylpseudouracil
  modified_base 1072: mod_base = OTHER; note = N1-methylpseudouracil
  modified_base 1075: mod_base = OTHER; note = N1-methylpseudouracil
  modified_base 1080: mod_base = OTHER; note = N1-methylpseudouracil
  modified_base 1087: mod_base = OTHER; note = N1-methylpseudouracil
  modified_base 1090: mod_base = OTHER; note = N1-methylpseudouracil
  modified_base 1099: mod_base = OTHER; note = N1-methylpseudouracil
  modified_base 1102: mod_base = OTHER; note = N1-methylpseudouracil
  modified_base 1105: mod_base = OTHER; note = N1-methylpseudouracil
  modified_base 1114: mod_base = OTHER; note = N1-methylpseudouracil
  modified_base 1116: mod_base = OTHER; note = N1-methylpseudouracil
  modified_base 1117: mod_base = OTHER; note = N1-methylpseudouracil
  modified_base 1126: mod_base = OTHER; note = N1-methylpseudouracil
  modified_base 1127: mod_base = OTHER; note = N1-methylpseudouracil
  modified_base 1131: mod_base = OTHER; note = N1-methylpseudouracil
  modified_base 1132: mod_base = OTHER; note = N1-methylpseudouracil
  modified_base 1134: mod_base = OTHER; note = N1-methylpseudouracil
  modified_base 1138: mod_base = OTHER; note = N1-methylpseudouracil
  modified_base 1141: mod_base = OTHER; note = N1-methylpseudouracil
  modified_base 1144: mod_base = OTHER; note = N1-methylpseudouracil
  modified_base 1150: mod_base = OTHER; note = N1-methylpseudouracil
  modified_base 1156: mod_base = OTHER; note = N1-methylpseudouracil
  modified_base 1167: mod_base = OTHER; note = N1-methylpseudouracil
  modified_base 1168: mod_base = OTHER; note = N1-methylpseudouracil
  modified_base 1172: mod_base = OTHER; note = N1-methylpseudouracil
  modified_base 1173: mod_base = OTHER; note = N1-methylpseudouracil
  modified_base 1180: mod_base = OTHER; note = N1-methylpseudouracil
  modified_base 1187: mod_base = OTHER; note = N1-methylpseudouracil
  modified_base 1188: mod_base = OTHER; note = N1-methylpseudouracil
  modified_base 1191: mod_base = OTHER; note = N1-methylpseudouracil
  modified_base 1201: mod_base = OTHER; note = N1-methylpseudouracil
  modified_base 1210: mod_base = OTHER; note = N1-methylpseudouracil
  modified_base 1219: mod_base = OTHER; note = N1-methylpseudouracil
  modified_base 1227: mod_base = OTHER; note = N1-methylpseudouracil
  modified_base 1228: mod_base = OTHER; note = N1-methylpseudouracil
  modified_base 1229: mod_base = OTHER; note = N1-methylpseudouracil
  modified_base 1231: mod_base = OTHER; note = N1-methylpseudouracil
  modified_base 1245: mod_base = OTHER; note = N1-methylpseudouracil
  modified_base 1247: mod_base = OTHER; note = N1-methylpseudouracil
  modified_base 1255: mod_base = OTHER; note = N1-methylpseudouracil
  modified_base 1260: mod_base = OTHER; note = N1-methylpseudouracil
  modified_base 1267: mod_base = OTHER; note = N1-methylpseudouracil
  modified_base 1282: mod_base = OTHER; note = N1-methylpseudouracil
  modified_base 1285: mod_base = OTHER; note = N1-methylpseudouracil
  modified_base 1288: mod_base = OTHER; note = N1-methylpseudouracil
  modified_base 1297: mod_base = OTHER; note = N1-methylpseudouracil
  modified_base 1305: mod_base = OTHER; note = N1-methylpseudouracil
  modified_base 1306: mod_base = OTHER; note = N1-methylpseudouracil
  modified_base 1308: mod_base = OTHER; note = N1-methylpseudouracil
  modified_base 1320: mod_base = OTHER; note = N1-methylpseudouracil
  modified_base 1321: mod_base = OTHER; note = N1-methylpseudouracil
  modified_base 1330: mod_base = OTHER; note = N1-methylpseudouracil
  modified_base 1332: mod_base = OTHER; note = N1-methylpseudouracil
  modified_base 1333: mod_base = OTHER; note = N1-methylpseudouracil
  modified_base 1355: mod_base = OTHER; note = N1-methylpseudouracil
  modified_base 1386: mod_base = OTHER; note = N1-methylpseudouracil
  modified_base 1390: mod_base = OTHER; note = N1-methylpseudouracil
  modified_base 1392: mod_base = OTHER; note = N1-methylpseudouracil
  modified_base 1393: mod_base = OTHER; note = N1-methylpseudouracil
  modified_base 1395: mod_base = OTHER; note = N1-methylpseudouracil
  modified_base 1396: mod_base = OTHER; note = N1-methylpseudouracil
  modified_base 1404: mod_base = OTHER; note = N1-methylpseudouracil
  modified_base 1405: mod_base = OTHER; note = N1-methylpseudouracil
  modified_base 1406: mod_base = OTHER; note = N1-methylpseudouracil
  modified_base 1411: mod_base = OTHER; note = N1-methylpseudouracil
  modified_base 1414: mod_base = OTHER; note = N1-methylpseudouracil
  modified_base 1424: mod_base = OTHER; note = N1-methylpseudouracil
  modified_base 1426: mod_base = OTHER; note = N1-methylpseudouracil
  modified_base 1429: mod_base = OTHER; note = N1-methylpseudouracil
  modified_base 1438: mod_base = OTHER; note = N1-methylpseudouracil
  modified_base 1443: mod_base = OTHER; note = N1-methylpseudouracil
  modified_base 1444: mod_base = OTHER; note = N1-methylpseudouracil
  modified_base 1450: mod_base = OTHER; note = N1-methylpseudouracil
  modified_base 1465: mod_base = OTHER; note = N1-methylpseudouracil
  modified_base 1468: mod_base = OTHER; note = N1-methylpseudouracil
  modified_base 1474: mod_base = OTHER; note = N1-methylpseudouracil
  modified_base 1482: mod_base = OTHER; note = N1-methylpseudouracil
  modified_base 1484: mod_base = OTHER; note = N1-methylpseudouracil
  modified_base 1507: mod_base = OTHER; note = N1-methylpseudouracil
  modified_base 1510: mod_base = OTHER; note = N1-methylpseudouracil
  modified_base 1513: mod_base = OTHER; note = N1-methylpseudouracil
  modified_base 1516: mod_base = OTHER; note = N1-methylpseudouracil
  modified_base 1519: mod_base = OTHER; note = N1-methylpseudouracil
  modified_base 1522: mod_base = OTHER; note = N1-methylpseudouracil
  modified_base 1531: mod_base = OTHER; note = N1-methylpseudouracil
  modified_base 1552: mod_base = OTHER; note = N1-methylpseudouracil
  modified_base 1570: mod_base = OTHER; note = N1-methylpseudouracil
  modified_base 1572: mod_base = OTHER; note = N1-methylpseudouracil
  modified_base 1575: mod_base = OTHER; note = N1-methylpseudouracil
  modified_base 1576: mod_base = OTHER; note = N1-methylpseudouracil
  modified_base 1578: mod_base = OTHER; note = N1-methylpseudouracil
  modified_base 1581: mod_base = OTHER; note = N1-methylpseudouracil
  modified_base 1587: mod_base = OTHER; note = N1-methylpseudouracil
  modified_base 1588: mod_base = OTHER; note = N1-methylpseudouracil
  modified_base 1590: mod_base = OTHER; note = N1-methylpseudouracil
  modified_base 1593: mod_base = OTHER; note = N1-methylpseudouracil
  modified_base 1597: mod_base = OTHER; note = N1-methylpseudouracil
  modified_base 1600: mod_base = OTHER; note = N1-methylpseudouracil
  modified_base 1612: mod_base = OTHER; note = N1-methylpseudouracil
  modified_base 1624: mod_base = OTHER; note = N1-methylpseudouracil
  modified_base 1627: mod_base = OTHER; note = N1-methylpseudouracil
  modified_base 1629: mod_base = OTHER; note = N1-methylpseudouracil
  modified_base 1630: mod_base = OTHER; note = N1-methylpseudouracil
  modified_base 1636: mod_base = OTHER; note = N1-methylpseudouracil
  modified_base 1641: mod_base = OTHER; note = N1-methylpseudouracil
  modified_base 1650: mod_base = OTHER; note = N1-methylpseudouracil
  modified_base 1656: mod_base = OTHER; note = N1-methylpseudouracil
  modified_base 1666: mod_base = OTHER; note = N1-methylpseudouracil
  modified_base 1669: mod_base = OTHER; note = N1-methylpseudouracil
  modified_base 1677: mod_base = OTHER; note = N1-methylpseudouracil
  modified_base 1684: mod_base = OTHER; note = N1-methylpseudouracil
  modified_base 1696: mod_base = OTHER; note = N1-methylpseudouracil
  modified_base 1698: mod_base = OTHER; note = N1-methylpseudouracil
  modified_base 1704: mod_base = OTHER; note = N1-methylpseudouracil
  modified_base 1705: mod_base = OTHER; note = N1-methylpseudouracil
  modified_base 1706: mod_base = OTHER; note = N1-methylpseudouracil
  modified_base 1723: mod_base = OTHER; note = N1-methylpseudouracil
  modified_base 1724: mod_base = OTHER; note = N1-methylpseudouracil
  modified_base 1726: mod_base = OTHER; note = N1-methylpseudouracil
  modified_base 1729: mod_base = OTHER; note = N1-methylpseudouracil
  modified_base 1744: mod_base = OTHER; note = N1-methylpseudouracil
  modified_base 1750: mod_base = OTHER; note = N1-methylpseudouracil
  modified_base 1752: mod_base = OTHER; note = N1-methylpseudouracil
  modified_base 1757: mod_base = OTHER; note = N1-methylpseudouracil
  modified_base 1766: mod_base = OTHER; note = N1-methylpseudouracil
  modified_base 1774: mod_base = OTHER; note = N1-methylpseudouracil
  modified_base 1776: mod_base = OTHER; note = N1-methylpseudouracil
  modified_base 1780: mod_base = OTHER; note = N1-methylpseudouracil
  modified_base 1790: mod_base = OTHER; note = N1-methylpseudouracil
  modified_base 1792: mod_base = OTHER; note = N1-methylpseudouracil
  modified_base 1794: mod_base = OTHER; note = N1-methylpseudouracil
  modified_base 1810: mod_base = OTHER; note = N1-methylpseudouracil
  modified_base 1812: mod_base = OTHER; note = N1-methylpseudouracil
  modified_base 1816: mod_base = OTHER; note = N1-methylpseudouracil
  modified_base 1819: mod_base = OTHER; note = N1-methylpseudouracil
  modified_base 1829: mod_base = OTHER; note = N1-methylpseudouracil
  modified_base 1830: mod_base = OTHER; note = N1-methylpseudouracil
  modified_base 1831: mod_base = OTHER; note = N1-methylpseudouracil
  modified_base 1832: mod_base = OTHER; note = N1-methylpseudouracil
  modified_base 1836: mod_base = OTHER; note = N1-methylpseudouracil
  modified_base 1840: mod_base = OTHER; note = N1-methylpseudouracil
  modified_base 1846: mod_base = OTHER; note = N1-methylpseudouracil
  modified_base 1849: mod_base = OTHER; note = N1-methylpseudouracil
  modified_base 1864: mod_base = OTHER; note = N1-methylpseudouracil
  modified_base 1866: mod_base = OTHER; note = N1-methylpseudouracil
  modified_base 1867: mod_base = OTHER; note = N1-methylpseudouracil
  modified_base 1872: mod_base = OTHER; note = N1-methylpseudouracil
  modified_base 1875: mod_base = OTHER; note = N1-methylpseudouracil
  modified_base 1879: mod_base = OTHER; note = N1-methylpseudouracil
  modified_base 1881: mod_base = OTHER; note = N1-methylpseudouracil
  modified_base 1883: mod_base = OTHER; note = N1-methylpseudouracil
  modified_base 1888: mod_base = OTHER; note = N1-methylpseudouracil
  modified_base 1891: mod_base = OTHER; note = N1-methylpseudouracil
  modified_base 1909: mod_base = OTHER; note = N1-methylpseudouracil
  modified_base 1912: mod_base = OTHER; note = N1-methylpseudouracil
  modified_base 1915: mod_base = OTHER; note = N1-methylpseudouracil
  modified_base 1927: mod_base = OTHER; note = N1-methylpseudouracil
  modified_base 1934: mod_base = OTHER; note = N1-methylpseudouracil
  modified_base 1936: mod_base = OTHER; note = N1-methylpseudouracil
  modified_base 1954: mod_base = OTHER; note = N1-methylpseudouracil
  modified_base 1957: mod_base = OTHER; note = N1-methylpseudouracil
  modified_base 1960: mod_base = OTHER; note = N1-methylpseudouracil
  modified_base 1963: mod_base = OTHER; note = N1-methylpseudouracil
  modified_base 1974: mod_base = OTHER; note = N1-methylpseudouracil
  modified_base 1980: mod_base = OTHER; note = N1-methylpseudouracil
  modified_base 1983: mod_base = OTHER; note = N1-methylpseudouracil
  modified_base 1984: mod_base = OTHER; note = N1-methylpseudouracil
  modified_base 1986: mod_base = OTHER; note = N1-methylpseudouracil
  modified_base 1995: mod_base = OTHER; note = N1-methylpseudouracil
  modified_base 1996: mod_base = OTHER; note = N1-methylpseudouracil
  modified_base 2005: mod_base = OTHER; note = N1-methylpseudouracil
  modified_base 2014: mod_base = OTHER; note = N1-methylpseudouracil
  modified_base 2025: mod_base = OTHER; note = N1-methylpseudouracil
  modified_base 2026: mod_base = OTHER; note = N1-methylpseudouracil
  modified_base 2031: mod_base = OTHER; note = N1-methylpseudouracil
  modified_base 2038: mod_base = OTHER; note = N1-methylpseudouracil
  modified_base 2041: mod_base = OTHER; note = N1-methylpseudouracil
  modified_base 2046: mod_base = OTHER; note = N1-methylpseudouracil
  modified_base 2051: mod_base = OTHER; note = N1-methylpseudouracil
  modified_base 2055: mod_base = OTHER; note = N1-methylpseudouracil
  modified_base 2056: mod_base = OTHER; note = N1-methylpseudouracil
  modified_base 2064: mod_base = OTHER; note = N1-methylpseudouracil
  modified_base 2065: mod_base = OTHER; note = N1-methylpseudouracil
  modified_base 2067: mod_base = OTHER; note = N1-methylpseudouracil
  modified_base 2085: mod_base = OTHER; note = N1-methylpseudouracil
  modified_base 2089: mod_base = OTHER; note = N1-methylpseudouracil
  modified_base 2090: mod_base = OTHER; note = N1-methylpseudouracil
  modified_base 2092: mod_base = OTHER; note = N1-methylpseudouracil
  modified_base 2104: mod_base = OTHER; note = N1-methylpseudouracil
  modified_base 2112: mod_base = OTHER; note = N1-methylpseudouracil
  modified_base 2113: mod_base = OTHER; note = N1-methylpseudouracil
  modified_base 2115: mod_base = OTHER; note = N1-methylpseudouracil
  modified_base 2119: mod_base = OTHER; note = N1-methylpseudouracil
  modified_base 2137: mod_base = OTHER; note = N1-methylpseudouracil
  modified_base 2142: mod_base = OTHER; note = N1-methylpseudouracil
  modified_base 2166: mod_base = OTHER; note = N1-methylpseudouracil
  modified_base 2167: mod_base = OTHER; note = N1-methylpseudouracil
  modified_base 2184: mod_base = OTHER; note = N1-methylpseudouracil
  modified_base 2185: mod_base = OTHER; note = N1-methylpseudouracil
  modified_base 2205: mod_base = OTHER; note = N1-methylpseudouracil
  modified_base 2209: mod_base = OTHER; note = N1-methylpseudouracil
  modified_base 2212: mod_base = OTHER; note = N1-methylpseudouracil
  modified_base 2221: mod_base = OTHER; note = N1-methylpseudouracil
  modified_base 2230: mod_base = OTHER; note = N1-methylpseudouracil
  modified_base 2238: mod_base = OTHER; note = N1-methylpseudouracil
  modified_base 2239: mod_base = OTHER; note = N1-methylpseudouracil
  modified_base 2245: mod_base = OTHER; note = N1-methylpseudouracil
  modified_base 2248: mod_base = OTHER; note = N1-methylpseudouracil
  modified_base 2261: mod_base = OTHER; note = N1-methylpseudouracil
  modified_base 2263: mod_base = OTHER; note = N1-methylpseudouracil
  modified_base 2269: mod_base = OTHER; note = N1-methylpseudouracil
  modified_base 2278: mod_base = OTHER; note = N1-methylpseudouracil
  modified_base 2302: mod_base = OTHER; note = N1-methylpseudouracil
  modified_base 2314: mod_base = OTHER; note = N1-methylpseudouracil
  modified_base 2316: mod_base = OTHER; note = N1-methylpseudouracil
  modified_base 2320: mod_base = OTHER; note = N1-methylpseudouracil
  modified_base 2323: mod_base = OTHER; note = N1-methylpseudouracil
  modified_base 2350: mod_base = OTHER; note = N1-methylpseudouracil
  modified_base 2353: mod_base = OTHER; note = N1-methylpseudouracil
  modified_base 2362: mod_base = OTHER; note = N1-methylpseudouracil
  modified_base 2364: mod_base = OTHER; note = N1-methylpseudouracil
  modified_base 2368: mod_base = OTHER; note = N1-methylpseudouracil
  modified_base 2371: mod_base = OTHER; note = N1-methylpseudouracil
  modified_base 2373: mod_base = OTHER; note = N1-methylpseudouracil
  modified_base 2378: mod_base = OTHER; note = N1-methylpseudouracil
  modified_base 2389: mod_base = OTHER; note = N1-methylpseudouracil
  modified_base 2413: mod_base = OTHER; note = N1-methylpseudouracil
  modified_base 2416: mod_base = OTHER; note = N1-methylpseudouracil
  modified_base 2422: mod_base = OTHER; note = N1-methylpseudouracil
  modified_base 2425: mod_base = OTHER; note = N1-methylpseudouracil
  modified_base 2437: mod_base = OTHER; note = N1-methylpseudouracil
  modified_base 2453: mod_base = OTHER; note = N1-methylpseudouracil
  modified_base 2455: mod_base = OTHER; note = N1-methylpseudouracil
  modified_base 2468: mod_base = OTHER; note = N1-methylpseudouracil
  modified_base 2488: mod_base = OTHER; note = N1-methylpseudouracil
  modified_base 2494: mod_base = OTHER; note = N1-methylpseudouracil
  modified_base 2498: mod_base = OTHER; note = N1-methylpseudouracil
  modified_base 2512: mod_base = OTHER; note = N1-methylpseudouracil
  modified_base 2521: mod_base = OTHER; note = N1-methylpseudouracil
  modified_base 2527: mod_base = OTHER; note = N1-methylpseudouracil
  modified_base 2529: mod_base = OTHER; note = N1-methylpseudouracil
  modified_base 2542: mod_base = OTHER; note = N1-methylpseudouracil
  modified_base 2560: mod_base = OTHER; note = N1-methylpseudouracil
  modified_base 2566: mod_base = OTHER; note = N1-methylpseudouracil
  modified_base 2578: mod_base = OTHER; note = N1-methylpseudouracil
  modified_base 2593: mod_base = OTHER; note = N1-methylpseudouracil
  modified_base 2601: mod_base = OTHER; note = N1-methylpseudouracil
  modified_base 2604: mod_base = OTHER; note = N1-methylpseudouracil
  modified_base 2605: mod_base = OTHER; note = N1-methylpseudouracil
  modified_base 2607: mod_base = OTHER; note = N1-methylpseudouracil
  modified_base 2608: mod_base = OTHER; note = N1-methylpseudouracil
  modified_base 2617: mod_base = OTHER; note = N1-methylpseudouracil
  modified_base 2622: mod_base = OTHER; note = N1-methylpseudouracil
  modified_base 2626: mod_base = OTHER; note = N1-methylpseudouracil
  modified_base 2635: mod_base = OTHER; note = N1-methylpseudouracil
  modified_base 2643: mod_base = OTHER; note = N1-methylpseudouracil
  modified_base 2652: mod_base = OTHER; note = N1-methylpseudouracil
  modified_base 2656: mod_base = OTHER; note = N1-methylpseudouracil
  modified_base 2661: mod_base = OTHER; note = N1-methylpseudouracil
  modified_base 2665: mod_base = OTHER; note = N1-methylpseudouracil
  modified_base 2671: mod_base = OTHER; note = N1-methylpseudouracil
  modified_base 2683: mod_base = OTHER; note = N1-methylpseudouracil
  modified_base 2686: mod_base = OTHER; note = N1-methylpseudouracil
  modified_base 2688: mod_base = OTHER; note = N1-methylpseudouracil
  modified_base 2689: mod_base = OTHER; note = N1-methylpseudouracil
  modified_base 2692: mod_base = OTHER; note = N1-methylpseudouracil
  modified_base 2695: mod_base = OTHER; note = N1-methylpseudouracil
  modified_base 2698: mod_base = OTHER; note = N1-methylpseudouracil
  modified_base 2700: mod_base = OTHER; note = N1-methylpseudouracil
  modified_base 2703: mod_base = OTHER; note = N1-methylpseudouracil
  modified_base 2707: mod_base = OTHER; note = N1-methylpseudouracil
  modified_base 2710: mod_base = OTHER; note = N1-methylpseudouracil
  modified_base 2713: mod_base = OTHER; note = N1-methylpseudouracil
  modified_base 2715: mod_base = OTHER; note = N1-methylpseudouracil
  modified_base 2716: mod_base = OTHER; note = N1-methylpseudouracil
  modified_base 2718: mod_base = OTHER; note = N1-methylpseudouracil
  modified_base 2719: mod_base = OTHER; note = N1-methylpseudouracil
  modified_base 2728: mod_base = OTHER; note = N1-methylpseudouracil
  modified_base 2736: mod_base = OTHER; note = N1-methylpseudouracil
  modified_base 2740: mod_base = OTHER; note = N1-methylpseudouracil
  modified_base 2743: mod_base = OTHER; note = N1-methylpseudouracil
  modified_base 2746: mod_base = OTHER; note = N1-methylpseudouracil
  modified_base 2749: mod_base = OTHER; note = N1-methylpseudouracil
  modified_base 2751: mod_base = OTHER; note = N1-methylpseudouracil
  modified_base 2755: mod_base = OTHER; note = N1-methylpseudouracil
  modified_base 2758: mod_base = OTHER; note = N1-methylpseudouracil
  modified_base 2765: mod_base = OTHER; note = N1-methylpseudouracil
  modified_base 2773: mod_base = OTHER; note = N1-methylpseudouracil
  modified_base 2790: mod_base = OTHER; note = N1-methylpseudouracil
  modified_base 2814: mod_base = OTHER; note = N1-methylpseudouracil
  modified_base 2821: mod_base = OTHER; note = N1-methylpseudouracil
  modified_base 2824: mod_base = OTHER; note = N1-methylpseudouracil
  modified_base 2827: mod_base = OTHER; note = N1-methylpseudouracil
  modified_base 2832: mod_base = OTHER; note = N1-methylpseudouracil
  modified_base 2844: mod_base = OTHER; note = N1-methylpseudouracil
  modified_base 2847: mod_base = OTHER; note = N1-methylpseudouracil
  modified_base 2851: mod_base = OTHER; note = N1-methylpseudouracil
  modified_base 2853: mod_base = OTHER; note = N1-methylpseudouracil
  modified_base 2854: mod_base = OTHER; note = N1-methylpseudouracil
  modified_base 2856: mod_base = OTHER; note = N1-methylpseudouracil
  modified_base 2860: mod_base = OTHER; note = N1-methylpseudouracil
  modified_base 2862: mod_base = OTHER; note = N1-methylpseudouracil
  modified_base 2866: mod_base = OTHER; note = N1-methylpseudouracil
  modified_base 2872: mod_base = OTHER; note = N1-methylpseudouracil
  modified_base 2884: mod_base = OTHER; note = N1-methylpseudouracil
  modified_base 2887: mod_base = OTHER; note = N1-methylpseudouracil
  modified_base 2893: mod_base = OTHER; note = N1-methylpseudouracil
  modified_base 2898: mod_base = OTHER; note = N1-methylpseudouracil
  modified_base 2899: mod_base = OTHER; note = N1-methylpseudouracil
  modified_base 2901: mod_base = OTHER; note = N1-methylpseudouracil
  modified_base 2902: mod_base = OTHER; note = N1-methylpseudouracil
  modified_base 2911: mod_base = OTHER; note = N1-methylpseudouracil
  modified_base 2915: mod_base = OTHER; note = N1-methylpseudouracil
  modified_base 2917: mod_base = OTHER; note = N1-methylpseudouracil
  modified_base 2920: mod_base = OTHER; note = N1-methylpseudouracil
  modified_base 2929: mod_base = OTHER; note = N1-methylpseudouracil
  modified_base 2932: mod_base = OTHER; note = N1-methylpseudouracil
  modified_base 2938: mod_base = OTHER; note = N1-methylpseudouracil
  modified_base 2947: mod_base = OTHER; note = N1-methylpseudouracil
  modified_base 2950: mod_base = OTHER; note = N1-methylpseudouracil
  modified_base 2962: mod_base = OTHER; note = N1-methylpseudouracil
  modified_base 2965: mod_base = OTHER; note = N1-methylpseudouracil
  modified_base 2974: mod_base = OTHER; note = N1-methylpseudouracil
  modified_base 2977: mod_base = OTHER; note = N1-methylpseudouracil
  modified_base 2984: mod_base = OTHER; note = N1-methylpseudouracil
  modified_base 2989: mod_base = OTHER; note = N1-methylpseudouracil
  modified_base 2991: mod_base = OTHER; note = N1-methylpseudouracil
  modified_base 2998: mod_base = OTHER; note = N1-methylpseudouracil
  modified_base 3007: mod_base = OTHER; note = N1-methylpseudouracil
  modified_base 3022: mod_base = OTHER; note = N1-methylpseudouracil
  modified_base 3025: mod_base = OTHER; note = N1-methylpseudouracil
  modified_base 3033: mod_base = OTHER; note = N1-methylpseudouracil
  modified_base 3034: mod_base = OTHER; note = N1-methylpseudouracil
  modified_base 3046: mod_base = OTHER; note = N1-methylpseudouracil
  modified_base 3052: mod_base = OTHER; note = N1-methylpseudouracil
  modified_base 3053: mod_base = OTHER; note = N1-methylpseudouracil
  modified_base 3055: mod_base = OTHER; note = N1-methylpseudouracil
  modified_base 3062: mod_base = OTHER; note = N1-methylpseudouracil
  modified_base 3064: mod_base = OTHER; note = N1-methylpseudouracil
  modified_base 3067: mod_base = OTHER; note = N1-methylpseudouracil
  modified_base 3073: mod_base = OTHER; note = N1-methylpseudouracil
  modified_base 3079: mod_base = OTHER; note = N1-methylpseudouracil
  modified_base 3081: mod_base = OTHER; note = N1-methylpseudouracil
  modified_base 3082: mod_base = OTHER; note = N1-methylpseudouracil
  modified_base 3087: mod_base = OTHER; note = N1-methylpseudouracil
  modified_base 3088: mod_base = OTHER; note = N1-methylpseudouracil
  modified_base 3091: mod_base = OTHER; note = N1-methylpseudouracil
  modified_base 3097: mod_base = OTHER; note = N1-methylpseudouracil
  modified_base 3100: mod_base = OTHER; note = N1-methylpseudouracil
  modified_base 3103: mod_base = OTHER; note = N1-methylpseudouracil
  modified_base 3106: mod_base = OTHER; note = N1-methylpseudouracil
  modified_base 3109: mod_base = OTHER; note = N1-methylpseudouracil
  modified_base 3112: mod_base = OTHER; note = N1-methylpseudouracil
  modified_base 3121: mod_base = OTHER; note = N1-methylpseudouracil
  modified_base 3127: mod_base = OTHER; note = N1-methylpseudouracil
  modified_base 3130: mod_base = OTHER; note = N1-methylpseudouracil
  modified_base 3136: mod_base = OTHER; note = N1-methylpseudouracil
  modified_base 3139: mod_base = OTHER; note = N1-methylpseudouracil
  modified_base 3147: mod_base = OTHER; note = N1-methylpseudouracil
  modified_base 3151: mod_base = OTHER; note = N1-methylpseudouracil
  modified_base 3153: mod_base = OTHER; note = N1-methylpseudouracil
  modified_base 3154: mod_base = OTHER; note = N1-methylpseudouracil
  modified_base 3157: mod_base = OTHER; note = N1-methylpseudouracil
  modified_base 3166: mod_base = OTHER; note = N1-methylpseudouracil
  modified_base 3172: mod_base = OTHER; note = N1-methylpseudouracil
  modified_base 3175: mod_base = OTHER; note = N1-methylpseudouracil
  modified_base 3178: mod_base = OTHER; note = N1-methylpseudouracil
  modified_base 3183: mod_base = OTHER; note = N1-methylpseudouracil
  modified_base 3184: mod_base = OTHER; note = N1-methylpseudouracil
  modified_base 3187: mod_base = OTHER; note = N1-methylpseudouracil
  modified_base 3190: mod_base = OTHER; note = N1-methylpseudouracil
  modified_base 3193: mod_base = OTHER; note = N1-methylpseudouracil
  modified_base 3201: mod_base = OTHER; note = N1-methylpseudouracil
  modified_base 3204: mod_base = OTHER; note = N1-methylpseudouracil
  modified_base 3205: mod_base = OTHER; note = N1-methylpseudouracil
  modified_base 3208: mod_base = OTHER; note = N1-methylpseudouracil
  modified_base 3216: mod_base = OTHER; note = N1-methylpseudouracil
  modified_base 3226: mod_base = OTHER; note = N1-methylpseudouracil
  modified_base 3235: mod_base = OTHER; note = N1-methylpseudouracil
  modified_base 3259: mod_base = OTHER; note = N1-methylpseudouracil
  modified_base 3261: mod_base = OTHER; note = N1-methylpseudouracil
  modified_base 3262: mod_base = OTHER; note = N1-methylpseudouracil
  modified_base 3271: mod_base = OTHER; note = N1-methylpseudouracil
  modified_base 3274: mod_base = OTHER; note = N1-methylpseudouracil
  modified_base 3278: mod_base = OTHER; note = N1-methylpseudouracil
  modified_base 3283: mod_base = OTHER; note = N1-methylpseudouracil
  modified_base 3292: mod_base = OTHER; note = N1-methylpseudouracil
  modified_base 3294: mod_base = OTHER; note = N1-methylpseudouracil
  modified_base 3301: mod_base = OTHER; note = N1-methylpseudouracil
  modified_base 3309: mod_base = OTHER; note = N1-methylpseudouracil
  modified_base 3310: mod_base = OTHER; note = N1-methylpseudouracil
  modified_base 3324: mod_base = OTHER; note = N1-methylpseudouracil
  modified_base 3327: mod_base = OTHER; note = N1-methylpseudouracil
  modified_base 3328: mod_base = OTHER; note = N1-methylpseudouracil
  modified_base 3337: mod_base = OTHER; note = N1-methylpseudouracil
  modified_base 3339: mod_base = OTHER; note = N1-methylpseudouracil
  modified_base 3340: mod_base = OTHER; note = N1-methylpseudouracil
  modified_base 3350: mod_base = OTHER; note = N1-methylpseudouracil
  modified_base 3352: mod_base = OTHER; note = N1-methylpseudouracil
  modified_base 3358: mod_base = OTHER; note = N1-methylpseudouracil
  modified_base 3372: mod_base = OTHER; note = N1-methylpseudouracil
  modified_base 3375: mod_base = OTHER; note = N1-methylpseudouracil
  modified_base 3376: mod_base = OTHER; note = N1-methylpseudouracil
  modified_base 3379: mod_base = OTHER; note = N1-methylpseudouracil
  modified_base 3381: mod_base = OTHER; note = N1-methylpseudouracil
  modified_base 3385: mod_base = OTHER; note = N1-methylpseudouracil
  modified_base 3394: mod_base = OTHER; note = N1-methylpseudouracil
  modified_base 3399: mod_base = OTHER; note = N1-methylpseudouracil
  modified_base 3402: mod_base = OTHER; note = N1-methylpseudouracil
  modified_base 3403: mod_base = OTHER; note = N1-methylpseudouracil
  modified_base 3409: mod_base = OTHER; note = N1-methylpseudouracil
  modified_base 3415: mod_base = OTHER; note = N1-methylpseudouracil
  modified_base 3421: mod_base = OTHER; note = N1-methylpseudouracil
  modified_base 3424: mod_base = OTHER; note = N1-methylpseudouracil
  modified_base 3426: mod_base = OTHER; note = N1-methylpseudouracil
  modified_base 3427: mod_base = OTHER; note = N1-methylpseudouracil
  modified_base 3430: mod_base = OTHER; note = N1-methylpseudouracil
  modified_base 3433: mod_base = OTHER; note = N1-methylpseudouracil
  modified_base 3435: mod_base = OTHER; note = N1-methylpseudouracil
  modified_base 3436: mod_base = OTHER; note = N1-methylpseudouracil
  modified_base 3438: mod_base = OTHER; note = N1-methylpseudouracil
  modified_base 3439: mod_base = OTHER; note = N1-methylpseudouracil
  modified_base 3442: mod_base = OTHER; note = N1-methylpseudouracil
  modified_base 3448: mod_base = OTHER; note = N1-methylpseudouracil
  modified_base 3453: mod_base = OTHER; note = N1-methylpseudouracil
  modified_base 3454: mod_base = OTHER; note = N1-methylpseudouracil
  modified_base 3457: mod_base = OTHER; note = N1-methylpseudouracil
  modified_base 3459: mod_base = OTHER; note = N1-methylpseudouracil
  modified_base 3463: mod_base = OTHER; note = N1-methylpseudouracil
  modified_base 3466: mod_base = OTHER; note = N1-methylpseudouracil
  modified_base 3493: mod_base = OTHER; note = N1-methylpseudouracil
  modified_base 3499: mod_base = OTHER; note = N1-methylpseudouracil
  modified_base 3502: mod_base = OTHER; note = N1-methylpseudouracil
  modified_base 3505: mod_base = OTHER; note = N1-methylpseudouracil
  modified_base 3511: mod_base = OTHER; note = N1-methylpseudouracil
  modified_base 3517: mod_base = OTHER; note = N1-methylpseudouracil
  modified_base 3521: mod_base = OTHER; note = N1-methylpseudouracil
  modified_base 3523: mod_base = OTHER; note = N1-methylpseudouracil
  modified_base 3526: mod_base = OTHER; note = N1-methylpseudouracil
  modified_base 3535: mod_base = OTHER; note = N1-methylpseudouracil
  modified_base 3540: mod_base = OTHER; note = N1-methylpseudouracil
  modified_base 3547: mod_base = OTHER; note = N1-methylpseudouracil
  modified_base 3559: mod_base = OTHER; note = N1-methylpseudouracil
  modified_base 3565: mod_base = OTHER; note = N1-methylpseudouracil
  modified_base 3574: mod_base = OTHER; note = N1-methylpseudouracil
  modified_base 3577: mod_base = OTHER; note = N1-methylpseudouracil
  modified_base 3582: mod_base = OTHER; note = N1-methylpseudouracil
  modified_base 3586: mod_base = OTHER; note = N1-methylpseudouracil
  modified_base 3588: mod_base = OTHER; note = N1-methylpseudouracil
  modified_base 3595: mod_base = OTHER; note = N1-methylpseudouracil
  modified_base 3597: mod_base = OTHER; note = N1-methylpseudouracil
  modified_base 3598: mod_base = OTHER; note = N1-methylpseudouracil
  modified_base 3603: mod_base = OTHER; note = N1-methylpseudouracil
  modified_base 3604: mod_base = OTHER; note = N1-methylpseudouracil
  modified_base 3607: mod_base = OTHER; note = N1-methylpseudouracil
  modified_base 3613: mod_base = OTHER; note = N1-methylpseudouracil
  modified_base 3651: mod_base = OTHER; note = N1-methylpseudouracil
  modified_base 3667: mod_base = OTHER; note = N1-methylpseudouracil
  modified_base 3676: mod_base = OTHER; note = N1-methylpseudouracil
  modified_base 3679: mod_base = OTHER; note = N1-methylpseudouracil
  modified_base 3682: mod_base = OTHER; note = N1-methylpseudouracil
  modified_base 3683: mod_base = OTHER; note = N1-methylpseudouracil
  modified_base 3685: mod_base = OTHER; note = N1-methylpseudouracil
  modified_base 3700: mod_base = OTHER; note = N1-methylpseudouracil
  modified_base 3715: mod_base = OTHER; note = N1-methylpseudouracil
  modified_base 3717: mod_base = OTHER; note = N1-methylpseudouracil
  modified_base 3722: mod_base = OTHER; note = N1-methylpseudouracil
  modified_base 3723: mod_base = OTHER; note = N1-methylpseudouracil
  modified_base 3736: mod_base = OTHER; note = N1-methylpseudouracil
  modified_base 3742: mod_base = OTHER; note = N1-methylpseudouracil
  modified_base 3751: mod_base = OTHER; note = N1-methylpseudouracil
  modified_base 3762: mod_base = OTHER; note = N1-methylpseudouracil
  modified_base 3784: mod_base = OTHER; note = N1-methylpseudouracil
  modified_base 3787: mod_base = OTHER; note = N1-methylpseudouracil
  modified_base 3796: mod_base = OTHER; note = N1-methylpseudouracil
  modified_base 3801: mod_base = OTHER; note = N1-methylpseudouracil
  modified_base 3802: mod_base = OTHER; note = N1-methylpseudouracil
  modified_base 3804: mod_base = OTHER; note = N1-methylpseudouracil
  modified_base 3808: mod_base = OTHER; note = N1-methylpseudouracil
  modified_base 3809: mod_base = OTHER; note = N1-methylpseudouracil
  modified_base 3815: mod_base = OTHER; note = N1-methylpseudouracil
  modified_base 3826: mod_base = OTHER; note = N1-methylpseudouracil
  modified_base 3832: mod_base = OTHER; note = N1-methylpseudouracil
  modified_base 3834: mod_base = OTHER; note = N1-methylpseudouracil
  modified_base 3835: mod_base = OTHER; note = N1-methylpseudouracil
  modified_base 3851: mod_base = OTHER; note = N1-methylpseudouracil
  modified_base 3865: mod_base = OTHER; note = N1-methylpseudouracil
  modified_base 3868: mod_base = OTHER; note = N1-methylpseudouracil
  modified_base 3870: mod_base = OTHER; note = N1-methylpseudouracil
  modified_base 3876: mod_base = OTHER; note = N1-methylpseudouracil
  modified_base 3877: mod_base = OTHER; note = N1-methylpseudouracil
  modified_base 3880: mod_base = OTHER; note = N1-methylpseudouracil
  modified_base 3886: mod_base = OTHER; note = N1-methylpseudouracil
  modified_base 3889: mod_base = OTHER; note = N1-methylpseudouracil
  modified_base 3907: mod_base = OTHER; note = N1-methylpseudouracil
  modified_base 3913: mod_base = OTHER; note = N1-methylpseudouracil
  modified_base 3922: mod_base = OTHER; note = N1-methylpseudouracil
  modified_base 3927: mod_base = OTHER; note = N1-methylpseudouracil
  modified_base 3937: mod_base = OTHER; note = N1-methylpseudouracil
  modified_base 3943: mod_base = OTHER; note = N1-methylpseudouracil
  modified_base 3951: mod_base = OTHER; note = N1-methylpseudouracil
  modified_base 3963: mod_base = OTHER; note = N1-methylpseudouracil
  modified_base 3964: mod_base = OTHER; note = N1-methylpseudouracil
  modified_base 3970: mod_base = OTHER; note = N1-methylpseudouracil
  modified_base 3973: mod_base = OTHER; note = N1-methylpseudouracil
  modified_base 3985: mod_base = OTHER; note = N1-methylpseudouracil
  modified_base 3987: mod_base = OTHER; note = N1-methylpseudouracil
  modified_base 3988: mod_base = OTHER; note = N1-methylpseudouracil
  modified_base 3989: mod_base = OTHER; note = N1-methylpseudouracil
  modified_base 3991: mod_base = OTHER; note = N1-methylpseudouracil
  modified_base 3992: mod_base = OTHER; note = N1-methylpseudouracil
  modified_base 3993: mod_base = OTHER; note = N1-methylpseudouracil
  modified_base 3994: mod_base = OTHER; note = N1-methylpseudouracil
  modified_base 3996: mod_base = OTHER; note = N1-methylpseudouracil
  modified_base 3998: mod_base = OTHER; note = N1-methylpseudouracil
  modified_base 4005: mod_base = OTHER; note = N1-methylpseudouracil
  modified_base 4006: mod_base = OTHER; note = N1-methylpseudouracil
  modified_base 4007: mod_base = OTHER; note = N1-methylpseudouracil
  modified_base 4018: mod_base = OTHER; note = N1-methylpseudouracil
  modified_base 4026: mod_base = OTHER; note = N1-methylpseudouracil
  modified_base 4035: mod_base = OTHER; note = N1-methylpseudouracil
  modified_base 4038: mod_base = OTHER; note = N1-methylpseudouracil
  modified_base 4051: mod_base = OTHER; note = N1-methylpseudouracil
  modified_base 4053: mod_base = OTHER; note = N1-methylpseudouracil
  modified_base 4060: mod_base = OTHER; note = N1-methylpseudouracil
  modified_base 4072: mod_base = OTHER; note = N1-methylpseudouracil
  modified_base 4078: mod_base = OTHER; note = N1-methylpseudouracil
  modified_base 4083: mod_base = OTHER; note = N1-methylpseudouracil
  modified_base 4087: mod_base = OTHER; note = N1-methylpseudouracil
  modified_base 4090: mod_base = OTHER; note = N1-methylpseudouracil
  modified_base 4098: mod_base = OTHER; note = N1-methylpseudouracil
  modified_base 4099: mod_base = OTHER; note = N1-methylpseudouracil
  modified_base 4111: mod_base = OTHER; note = N1-methylpseudouracil
  modified_base 4116: mod_base = OTHER; note = N1-methylpseudouracil
  modified_base 4117: mod_base = OTHER; note = N1-methylpseudouracil
  modified_base 4120: mod_base = OTHER; note = N1-methylpseudouracil
  modified_base 4123: mod_base = OTHER; note = N1-methylpseudouracil
  modified_base 4126: mod_base = OTHER; note = N1-methylpseudouracil
  modified_base 4137: mod_base = OTHER; note = N1-methylpseudouracil
  modified_base 4141: mod_base = OTHER; note = N1-methylpseudouracil
  modified_base 4144: mod_base = OTHER; note = N1-methylpseudouracil
  modified_base 4165: mod_base = OTHER; note = N1-methylpseudouracil
  modified_base 4168: mod_base = OTHER; note = N1-methylpseudouracil
  modified_base 4170: mod_base = OTHER; note = N1-methylpseudouracil
  modified_base 4174: mod_base = OTHER; note = N1-methylpseudouracil
  modified_base 4186: mod_base = OTHER; note = N1-methylpseudouracil
  modified_base 4189: mod_base = OTHER; note = N1-methylpseudouracil
  modified_base 4204: mod_base = OTHER; note = N1-methylpseudouracil
  modified_base 4207: mod_base = OTHER; note = N1-methylpseudouracil
  modified_base 4210: mod_base = OTHER; note = N1-methylpseudouracil
  modified_base 4213: mod_base = OTHER; note = N1-methylpseudouracil
  modified_base 4224: mod_base = OTHER; note = N1-methylpseudouracil
  modified_base 4234: mod_base = OTHER; note = N1-methylpseudouracil
  modified_base 4238: mod_base = OTHER; note = N1-methylpseudouracil
  modified_base 4243: mod_base = OTHER; note = N1-methylpseudouracil
  modified_base 4248: mod_base = OTHER; note = N1-methylpseudouracil
  modified_base 4255: mod_base = OTHER; note = N1-methylpseudouracil
  modified_base 4258: mod_base = OTHER; note = N1-methylpseudouracil
  modified_base 4270: mod_base = OTHER; note = N1-methylpseudouracil
  modified_base 4281: mod_base = OTHER; note = N1-methylpseudouracil
  modified_base 4282: mod_base = OTHER; note = N1-methylpseudouracil
  modified_base 4290: mod_base = OTHER; note = N1-methylpseudouracil
  modified_base 4297: mod_base = OTHER; note = N1-methylpseudouracil
  modified_base 4300: mod_base = OTHER; note = N1-methylpseudouracil
  modified_base 4303: mod_base = OTHER; note = N1-methylpseudouracil
  modified_base 4305: mod_base = OTHER; note = N1-methylpseudouracil
  modified_base 4318: mod_base = OTHER; note = N1-methylpseudouracil
  modified_base 4325: mod_base = OTHER; note = N1-methylpseudouracil
  modified_base 4327: mod_base = OTHER; note = N1-methylpseudouracil
  modified_base 4330: mod_base = OTHER; note = N1-methylpseudouracil
  modified_base 4335: mod_base = OTHER; note = N1-methylpseudouracil
  modified_base 4344: mod_base = OTHER; note = N1-methylpseudouracil
  modified_base 4345: mod_base = OTHER; note = N1-methylpseudouracil
  modified_base 4348: mod_base = OTHER; note = N1-methylpseudouracil
  modified_base 4351: mod_base = OTHER; note = N1-methylpseudouracil
  modified_base 4354: mod_base = OTHER; note = N1-methylpseudouracil
  modified_base 4369: mod_base = OTHER; note = N1-methylpseudouracil
  modified_base 4377: mod_base = OTHER; note = N1-methylpseudouracil
  modified_base 4383: mod_base = OTHER; note = N1-methylpseudouracil
  modified_base 4387: mod_base = OTHER; note = N1-methylpseudouracil
  modified_base 4396: mod_base = OTHER; note = N1-methylpseudouracil
  modified_base 4399: mod_base = OTHER; note = N1-methylpseudouracil
  modified_base 4414: mod_base = OTHER; note = N1-methylpseudouracil
  modified_base 4416: mod_base = OTHER; note = N1-methylpseudouracil
  modified_base 4417: mod_base = OTHER; note = N1-methylpseudouracil
  modified_base 4427: mod_base = OTHER; note = N1-methylpseudouracil
  modified_base 4429: mod_base = OTHER; note = N1-methylpseudouracil
  modified_base 4431: mod_base = OTHER; note = N1-methylpseudouracil
  modified_base 4433: mod_base = OTHER; note = N1-methylpseudouracil
  modified_base 4442: mod_base = OTHER; note = N1-methylpseudouracil
  modified_base 4447: mod_base = OTHER; note = N1-methylpseudouracil
  modified_base 4453: mod_base = OTHER; note = N1-methylpseudouracil
  modified_base 4455: mod_base = OTHER; note = N1-methylpseudouracil
  modified_base 4456: mod_base = OTHER; note = N1-methylpseudouracil
  modified_base 4460: mod_base = OTHER; note = N1-methylpseudouracil
  modified_base 4479: mod_base = OTHER; note = N1-methylpseudouracil
  modified_base 4485: mod_base = OTHER; note = N1-methylpseudouracil
  modified_base 4487: mod_base = OTHER; note = N1-methylpseudouracil
  modified_base 4498: mod_base = OTHER; note = N1-methylpseudouracil
  modified_base 4507: mod_base = OTHER; note = N1-methylpseudouracil
  modified_base 4531: mod_base = OTHER; note = N1-methylpseudouracil
  modified_base 4538: mod_base = OTHER; note = N1-methylpseudouracil
  modified_base 4546: mod_base = OTHER; note = N1-methylpseudouracil
  modified_base 4548: mod_base = OTHER; note = N1-methylpseudouracil
  modified_base 4554: mod_base = OTHER; note = N1-methylpseudouracil
  modified_base 4566: mod_base = OTHER; note = N1-methylpseudouracil
  modified_base 4575: mod_base = OTHER; note = N1-methylpseudouracil
  modified_base 4576: mod_base = OTHER; note = N1-methylpseudouracil
  modified_base 4578: mod_base = OTHER; note = N1-methylpseudouracil
  modified_base 4582: mod_base = OTHER; note = N1-methylpseudouracil
  modified_base 4583: mod_base = OTHER; note = N1-methylpseudouracil
  modified_base 4586: mod_base = OTHER; note = N1-methylpseudouracil
  modified_base 4589: mod_base = OTHER; note = N1-methylpseudouracil
  modified_base 4594: mod_base = OTHER; note = N1-methylpseudouracil
  modified_base 4597: mod_base = OTHER; note = N1-methylpseudouracil
  modified_base 4600: mod_base = OTHER; note = N1-methylpseudouracil
  modified_base 4611: mod_base = OTHER; note = N1-methylpseudouracil
  modified_base 4619: mod_base = OTHER; note = N1-methylpseudouracil
  modified_base 4627: mod_base = OTHER; note = N1-methylpseudouracil
  modified_base 4630: mod_base = OTHER; note = N1-methylpseudouracil
  modified_base 4632: mod_base = OTHER; note = N1-methylpseudouracil
  modified_base 4633: mod_base = OTHER; note = N1-methylpseudouracil
  modified_base 4634: mod_base = OTHER; note = N1-methylpseudouracil
  modified_base 4638: mod_base = OTHER; note = N1-methylpseudouracil
  modified_base 4643: mod_base = OTHER; note = N1-methylpseudouracil
  modified_base 4645: mod_base = OTHER; note = N1-methylpseudouracil
  modified_base 4649: mod_base = OTHER; note = N1-methylpseudouracil
ggaggaaatttttttttgatattataagagtttttttttgatattaagaaaatttttttttgatattagaagagtaagaagaaatataagaccccggcgccgccaccatgcagcggagccctctggagaaggccagcgtggtgagcaagctgttcttcagctggaccaggcccatcctgcgaaagggctacagacagaggctggagctgtccgacatctaccagattccatccgtggacagcgccgacaatctgagcgagaagctggagagggagtgggaccgcgagctggccagcaagaagaaccctaagctgatcaacgccctgcgccgctgcttcttctggaggttcatgttctacggcatcttcctgtacctgggcgaggtgaccaaggccgtccagcctctgctgctgggccgcatcatcgccagctacgatcccgacaacaaggaggaacgctccatcgccatctacctgggcatcggcctgtgtctgctgttcatcgtgcggaccctgctgctgcaccccgccatcttcggcctgcatcacatcggcatgcagatgaggatcgccatgttctccctgatctacaagaagaccctgaagctgtccagccgcgtgctggataagatcagcatcgggcagctggtgagcctgctgagcaacaacctgaacaagttcgacgaggggttggcgctggcccacttcgtgtggattgccccgctgcaggtggctctgctgatggggctgatctgggagctgctgcaggcctctgccttctgcgggctggggtttctgatcgtgctggccctgttccaagctggcctgggccgcatgatgatgaagtaccgcgatcagagggccggcaagatcagcgagcgcctggtgatcactagcgagatgatagagaacatccagagcgtgaaggcttactgttgggaggaggccatggagaagatgatcgagaacctgaggcagaccgagctgaagctgactagaaaggcagcctacgtgaggtatttcaactccagcgccttcttcttcagcggcttcttcgtggtgttcctgagcgtgctgccctacgccctgatcaagggcatcatcctgaggaagatcttcaccaccattagcttctgcatcgtgctgcgcatggccgtgaccaggcagttcccttgggccgtgcagacttggtacgacagcctgggagccatcaacaagatccaggactttctgcagaagcaggaatataagaccctggagtacaacctgaccaccaccgaggtggtgatggagaacgtgaccgccttctgggaggagggcttcggcgagctgttcgagaaggccaagcagaacaataacaaccgcaagaccagcaacggcgacgactccctcttcttcagcaactttagcctgctgggcacccctgtgctgaaggacatcaacttcaagatcgaaagaggccaactgctggccgtggccggatctaccggcgccggcaagaccagcctgctgatgatgatcatgggcgagctggagcccagcgagggcaagatcaagcacagcggccggatctccttctgctcccagttctcctggatcatgcccggcaccatcaaggagaacatcatcttcggcgtgagctacgacgagtacaggtaccggagcgtgatcaaggcctgccagctggaggaggacatctccaaatttgccgagaaggacaacattgtgctgggcgaaggcgggatcaccctgtccggtggccagcgtgcacgcatctccctggcccgggctgtgtacaaggacgccgacctgtacctgctggacagcccttttggctacctggacgtgctgaccgagaaggagatcttcgagtcctgcgtgtgtaagctgatggccaacaagaccagaatcctggtgaccagcaagatggagcatctgaagaaggccgacaagatcctgatcctgcacgaggggtccagctacttctacggcaccttcagcgagctgcagaacctgcagcccgacttcagctccaagctgatgggctgcgatagcttcgaccagttctccgccgagagaaggaactccattctgaccgagaccctgcaccgattctccctggagggagacgccccagtgagctggaccgagaccaagaagcagagcttcaagcagaccggcgagttcggagagaagcgcaagaactccatcctcaaccccatcaacagcatccggaagttcagcatcgtgcagaagacccctctgcagatgaacgggatcgaggaggacagcgacgagcccctggaacggcgactgtccctcgtgcccgacagcgagcagggcgaggccatcctgccccggatctccgtgatctccactgggcccaccctgcaagcccgacggcggcaaagcgtgctgaacctgatgacccacagcgtgaaccagggccagaatatccaccgcaagactacagccagcacccgcaaggtgagcctggctccccaggccaacctgaccgagctggacatctacagcaggaggctgagccaggagacaggcctggagatcagcgaggagatcaacgaggaggacctgaaggagtgcttcttcgacgacatggagtccatccccgccgtgaccacctggaacacctacctgagatacatcaccgtgcacaagagcctgatcttcgtgctgatctggtgcctggtgatcttcttggccgaggtagccgcctcactggtggtgctgtggctgctgggcaataccccactgcaggacaaggggaactccacccacagccggaacaacagctacgccgtgatcatcacctccaccagcagctactacgtgttctacatctacgtgggcgtggccgacacactgctggccatgggcttcttcagaggcctccctctggtgcacacactgatcaccgtgagcaagatcctgcaccacaagatgctgcacagcgtgctgcaggctcccatgtcaaccctgaacaccctgaaggccggcggcatcctgaacaggttcagcaaggacatcgccattctggacgatctgctgcccctgaccatcttcgacttcatccagctgctgctgatcgtgatcggggccatcgccgtggtggccgtgctgcagccctacatcttcgtggccacagtgcccgtgatcgtggccttcatcatgctgcgcgcctacttcctgcagacctcccagcagctgaagcagctggagagcgaaggccgcagccccatcttcacccacctggtgactagcctgaaggggctgtggaccctgcgcgccttcggcaggcagccctacttcgagaccctgttccacaaggctctgaacctgcacaccgccaactggttcctgtacctcagcaccctgcgctggttccagatgcggatcgagatgatcttcgtgatcttcttcatcgccgtgaccttcatctccatcctgaccaccggggaaggcgagggacgggtgggaatcatcctgaccctggccatgaatatcatgagcaccctgcagtgggccgtgaacagcagcatcgacgtggacagcctgatgcggtccgtgtcccgggtgttcaagttcatcgacatgcccaccgagggcaagcccaccaagagcaccaagccctacaagaacggccagctgagcaaggtgatgattatcgagaacagccacgtgaagaaggacgacatctggccttccggcggccagatgaccgtgaaggacctgaccgccaagtacaccgagggcggcaacgccatcctggagaacatcagcttctccattagccctggacagcgggtgggcctgttgggacggaccggcagtgggaagagcaccctgctgtccgccttcctgcggctgctgaacacggagggcgagatccagatcgacggggtgagctgggacagcatcaccctgcagcagtggcgaaaggccttcggcgtgatcccacagaaggtgtttattttctctggcacctttaggaagaacctggacccctacgagcagtggtccgaccaggagatctggaaggtggccgacgaggtgggcctgcggtcagtgatcgagcagttccccggcaagctggacttcgtgctggtggacggcggctgcgtgctgagccacggccacaagcagctgatgtgcctggcacgcagcgtgctgagcaaggccaagatcctgctgctggacgagccctccgcgcacctggatcccgtgacctaccagatcatcaggcggaccctgaagcaggccttcgccgactgcaccgtgatcctgtgcgagcacagaatcgaggctatgctggagtgccagcagttcctggtgatcgaggagaacaaggtgcggcagtacgactccatccagaagctgctgaacgagcgcagcctgttcagacaggctatctctcccagcgatcgcgtgaagctgttccctcacaggaacagcagcaagtgcaagtctaagccacagatcgccgccctgaaggaggagaccgaggaggaggtgcaggatacccgcctgtaaagctccccgggggcctccaccgcgttatccgttcctcgtaggctggtcctggggaacgggtcggcgggtacccccgtggtctttgaataaagtctgagtgggcggcaaaaaaaaaaaaaaaaaaaaaaaaaaaaaaaaaaaaaaaaaaaaaaaaaaaaaaaaaaaaaaaaaaaaaaaaaaaaaaaaaaaaaaaaaaaaaaaaaaaa

SEQ ID NO: 15 - RNA, 4756 nt, synthetic construct
  source 1..4756: mol_type = other RNA
  modified_base 1: mod_base = OTHER; note = 7-Methylguanosine with triphosphate linkage
  modified_base 2: mod_base = OTHER; note = 2'-O-methyl modified nucleotide
  modified_base 9: mod_base = OTHER; note = N1-methylpseudouracil
  modified_base 10: mod_base = OTHER; note = N1-methylpseudouracil
  modified_base 11: mod_base = OTHER; note = N1-methylpseudouracil
  modified_base 12: mod_base = OTHER; note = N1-methylpseudouracil
  modified_base 13: mod_base = OTHER; note = N1-methylpseudouracil
  modified_base 14: mod_base = OTHER; note = N1-methylpseudouracil
  modified_base 15: mod_base = OTHER; note = N1-methylpseudouracil
  modified_base 16: mod_base = OTHER; note = N1-methylpseudouracil
  modified_base 17: mod_base = OTHER; note = N1-methylpseudouracil
  modified_base 20: mod_base = OTHER; note = N1-methylpseudouracil
  modified_base 22: mod_base = OTHER; note = N1-methylpseudouracil
  modified_base 23: mod_base = OTHER; note = N1-methylpseudouracil
  modified_base 25: mod_base = OTHER; note = N1-methylpseudouracil
  modified_base 31: mod_base = OTHER; note = N1-methylpseudouracil
  modified_base 32: mod_base = OTHER; note = N1-methylpseudouracil
  modified_base 33: mod_base = OTHER; note = N1-methylpseudouracil
  modified_base 34: mod_base = OTHER; note = N1-methylpseudouracil
  modified_base 35: mod_base = OTHER; note = N1-methylpseudouracil
  modified_base 36: mod_base = OTHER; note = N1-methylpseudouracil
  modified_base 37: mod_base = OTHER; note = N1-methylpseudouracil
  modified_base 38: mod_base = OTHER; note = N1-methylpseudouracil
  modified_base 39: mod_base = OTHER; note = N1-methylpseudouracil
  modified_base 42: mod_base = OTHER; note = N1-methylpseudouracil
  modified_base 44: mod_base = OTHER; note = N1-methylpseudouracil
  modified_base 45: mod_base = OTHER; note = N1-methylpseudouracil
  modified_base 53: mod_base = OTHER; note = N1-methylpseudouracil
  modified_base 54: mod_base = OTHER; note = N1-methylpseudouracil
  modified_base 55: mod_base = OTHER; note = N1-methylpseudouracil
  modified_base 56: mod_base = OTHER; note = N1-methylpseudouracil
  modified_base 57: mod_base = OTHER; note = N1-methylpseudouracil
  modified_base 58: mod_base = OTHER; note = N1-methylpseudouracil
  modified_base 59: mod_base = OTHER; note = N1-methylpseudouracil
  modified_base 60: mod_base = OTHER; note = N1-methylpseudouracil
  modified_base 61: mod_base = OTHER; note = N1-methylpseudouracil
  modified_base 64: mod_base = OTHER; note = N1-methylpseudouracil
  modified_base 66: mod_base = OTHER; note = N1-methylpseudouracil
  modified_base 67: mod_base = OTHER; note = N1-methylpseudouracil
  modified_base 75: mod_base = OTHER; note = N1-methylpseudouracil
  modified_base 85: mod_base = OTHER; note = N1-methylpseudouracil
  modified_base 87: mod_base = OTHER; note = N1-methylpseudouracil
  modified_base 109: mod_base = OTHER; note = N1-methylpseudouracil
  modified_base 119: mod_base = OTHER; note = N1-methylpseudouracil
  modified_base 123: mod_base = OTHER; note = N1-methylpseudouracil
  modified_base 124: mod_base = OTHER; note = N1-methylpseudouracil
  modified_base 135: mod_base = OTHER; note = N1-methylpseudouracil
  modified_base 139: mod_base = OTHER; note = N1-methylpseudouracil
  modified_base 140: mod_base = OTHER; note = N1-methylpseudouracil
  modified_base 142: mod_base = OTHER; note = N1-methylpseudouracil
  modified_base 151: mod_base = OTHER; note = N1-methylpseudouracil
  modified_base 153: mod_base = OTHER; note = N1-methylpseudouracil
  modified_base 154: mod_base = OTHER; note = N1-methylpseudouracil
  modified_base 156: mod_base = OTHER; note = N1-methylpseudouracil
  modified_base 157: mod_base = OTHER; note = N1-methylpseudouracil
  modified_base 162: mod_base = OTHER; note = N1-methylpseudouracil
  modified_base 175: mod_base = OTHER; note = N1-methylpseudouracil
  modified_base 178: mod_base = OTHER; note = N1-methylpseudouracil
  modified_base 189: mod_base = OTHER; note = N1-methylpseudouracil
  modified_base 202: mod_base = OTHER; note = N1-methylpseudouracil
  modified_base 208: mod_base = OTHER; note = N1-methylpseudouracil
  modified_base 210: mod_base = OTHER; note = N1-methylpseudouracil
  modified_base 217: mod_base = OTHER; note = N1-methylpseudouracil
  modified_base 219: mod_base = OTHER; note = N1-methylpseudouracil
  modified_base 226: mod_base = OTHER; note = N1-methylpseudouracil
  modified_base 227: mod_base = OTHER; note = N1-methylpseudouracil
  modified_base 231: mod_base = OTHER; note = N1-methylpseudouracil
  modified_base 235: mod_base = OTHER; note = N1-methylpseudouracil
  modified_base 251: mod_base = OTHER; note = N1-methylpseudouracil
  modified_base 253: mod_base = OTHER; note = N1-methylpseudouracil
  modified_base 265: mod_base = OTHER; note = N1-methylpseudouracil
  modified_base 276: mod_base = OTHER; note = N1-methylpseudouracil
  modified_base 289: mod_base = OTHER; note = N1-methylpseudouracil
  modified_base 308: mod_base = OTHER; note = N1-methylpseudouracil
  modified_base 313: mod_base = OTHER; note = N1-methylpseudouracil
  modified_base 316: mod_base = OTHER; note = N1-methylpseudouracil
  modified_base 325: mod_base = OTHER; note = N1-methylpseudouracil
  modified_base 333: mod_base = OTHER; note = N1-methylpseudouracil
  modified_base 336: mod_base = OTHER; note = N1-methylpseudouracil
  modified_base 337: mod_base = OTHER; note = N1-methylpseudouracil
  modified_base 339: mod_base = OTHER; note = N1-methylpseudouracil
  modified_base 340: mod_base = OTHER; note = N1-methylpseudouracil
  modified_base 342: mod_base = OTHER; note = N1-methylpseudouracil
  modified_base 348: mod_base = OTHER; note = N1-methylpseudouracil
  modified_base 349: mod_base = OTHER; note = N1-methylpseudouracil
  modified_base 352: mod_base = OTHER; note = N1-methylpseudouracil
  modified_base 354: mod_base = OTHER; note = N1-methylpseudouracil
  modified_base 355: mod_base = OTHER; note = N1-methylpseudouracil
  modified_base 357: mod_base = OTHER; note = N1-methylpseudouracil
  modified_base 364: mod_base = OTHER; note = N1-methylpseudouracil
  modified_base 366: mod_base = OTHER; note = N1-methylpseudouracil
  modified_base 367: mod_base = OTHER; note = N1-methylpseudouracil
  modified_base 370: mod_base = OTHER; note = N1-methylpseudouracil
  modified_base 372: mod_base = OTHER; note = N1-methylpseudouracil
  modified_base 376: mod_base = OTHER; note = N1-methylpseudouracil
  modified_base 385: mod_base = OTHER; note = N1-methylpseudouracil
  modified_base 397: mod_base = OTHER; note = N1-methylpseudouracil
  modified_base 404: mod_base = OTHER; note = N1-methylpseudouracil
  modified_base 406: mod_base = OTHER; note = N1-methylpseudouracil
  modified_base 409: mod_base = OTHER; note = N1-methylpseudouracil
  modified_base 412: mod_base = OTHER; note = N1-methylpseudouracil
  modified_base 421: mod_base = OTHER; note = N1-methylpseudouracil
  modified_base 424: mod_base = OTHER; note = N1-methylpseudouracil
  modified_base 432: mod_base = OTHER; note = N1-methylpseudouracil
  modified_base 437: mod_base = OTHER; note = N1-methylpseudouracil
  modified_base 459: mod_base = OTHER; note = N1-methylpseudouracil
  modified_base 463: mod_base = OTHER; note = N1-methylpseudouracil
  modified_base 469: mod_base = OTHER; note = N1-methylpseudouracil
  modified_base 471: mod_base = OTHER; note = N1-methylpseudouracil
  modified_base 475: mod_base = OTHER; note = N1-methylpseudouracil
  modified_base 481: mod_base = OTHER; note = N1-methylpseudouracil
  modified_base 487: mod_base = OTHER; note = N1-methylpseudouracil
  modified_base 489: mod_base = OTHER; note = N1-methylpseudouracil
  modified_base 491: mod_base = OTHER; note = N1-methylpseudouracil
  modified_base 493: mod_base = OTHER; note = N1-methylpseudouracil
  modified_base 496: mod_base = OTHER; note = N1-methylpseudouracil
  modified_base 498: mod_base = OTHER; note = N1-methylpseudouracil
  modified_base 499: mod_base = OTHER; note = N1-methylpseudouracil
  modified_base 502: mod_base = OTHER; note = N1-methylpseudouracil
  modified_base 505: mod_base = OTHER; note = N1-methylpseudouracil
  modified_base 514: mod_base = OTHER; note = N1-methylpseudouracil
  modified_base 517: mod_base = OTHER; note = N1-methylpseudouracil
  modified_base 520: mod_base = OTHER; note = N1-methylpseudouracil
  modified_base 532: mod_base = OTHER; note = N1-methylpseudouracil
  modified_base 534: mod_base = OTHER; note = N1-methylpseudouracil
  modified_base 535: mod_base = OTHER; note = N1-methylpseudouracil
  modified_base 541: mod_base = OTHER; note = N1-methylpseudouracil
  modified_base 545: mod_base = OTHER; note = N1-methylpseudouracil
  modified_base 550: mod_base = OTHER; note = N1-methylpseudouracil
  modified_base 556: mod_base = OTHER; note = N1-methylpseudouracil
  modified_base 562: mod_base = OTHER; note = N1-methylpseudouracil
  modified_base 568: mod_base = OTHER; note = N1-methylpseudouracil
  modified_base 574: mod_base = OTHER; note = N1-methylpseudouracil
  modified_base 576: mod_base = OTHER; note = N1-methylpseudouracil
  modified_base 577: mod_base = OTHER; note = N1-methylpseudouracil
  modified_base 579: mod_base = OTHER; note = N1-methylpseudouracil
  modified_base 583: mod_base = OTHER; note = N1-methylpseudouracil
  modified_base 586: mod_base = OTHER; note = N1-methylpseudouracil
  modified_base 588: mod_base = OTHER; note = N1-methylpseudouracil
  modified_base 601: mod_base = OTHER; note = N1-methylpseudouracil
  modified_base 607: mod_base = OTHER; note = N1-methylpseudouracil
  modified_base 609: mod_base = OTHER; note = N1-methylpseudouracil
  modified_base 619: mod_base = OTHER; note = N1-methylpseudouracil
  modified_base 622: mod_base = OTHER; note = N1-methylpseudouracil
  modified_base 626: mod_base = OTHER; note = N1-methylpseudouracil
  modified_base 631: mod_base = OTHER; note = N1-methylpseudouracil
  modified_base 637: mod_base = OTHER; note = N1-methylpseudouracil
  modified_base 646: mod_base = OTHER; note = N1-methylpseudouracil
  modified_base 649: mod_base = OTHER; note = N1-methylpseudouracil
  modified_base 655: mod_base = OTHER; note = N1-methylpseudouracil
  modified_base 658: mod_base = OTHER; note = N1-methylpseudouracil
  modified_base 670: mod_base = OTHER; note = N1-methylpseudouracil
  modified_base 678: mod_base = OTHER; note = N1-methylpseudouracil
  modified_base 679: mod_base = OTHER; note = N1-methylpseudouracil
  modified_base 690: mod_base = OTHER; note = N1-methylpseudouracil
  modified_base 691: mod_base = OTHER; note = N1-methylpseudouracil
  modified_base 697: mod_base = OTHER; note = N1-methylpseudouracil
  modified_base 705: mod_base = OTHER; note = N1-methylpseudouracil
  modified_base 706: mod_base = OTHER; note = N1-methylpseudouracil
  modified_base 709: mod_base = OTHER; note = N1-methylpseudouracil
  modified_base 711: mod_base = OTHER; note = N1-methylpseudouracil
  modified_base 715: mod_base = OTHER; note = N1-methylpseudouracil
  modified_base 716: mod_base = OTHER; note = N1-methylpseudouracil
  modified_base 724: mod_base = OTHER; note = N1-methylpseudouracil
  modified_base 730: mod_base = OTHER; note = N1-methylpseudouracil
  modified_base 734: mod_base = OTHER; note = N1-methylpseudouracil
  modified_base 736: mod_base = OTHER; note = N1-methylpseudouracil
  modified_base 739: mod_base = OTHER; note = N1-methylpseudouracil
  modified_base 742: mod_base = OTHER; note = N1-methylpseudouracil
  modified_base 748: mod_base = OTHER; note = N1-methylpseudouracil
  modified_base 751: mod_base = OTHER; note = N1-methylpseudouracil
  modified_base 753: mod_base = OTHER; note = N1-methylpseudouracil
  modified_base 760: mod_base = OTHER; note = N1-methylpseudouracil
  modified_base 763: mod_base = OTHER; note = N1-methylpseudouracil
  modified_base 771: mod_base = OTHER; note = N1-methylpseudouracil
  modified_base 773: mod_base = OTHER; note = N1-methylpseudouracil
  modified_base 777: mod_base = OTHER; note = N1-methylpseudouracil
  modified_base 778: mod_base = OTHER; note = N1-methylpseudouracil
  modified_base 780: mod_base = OTHER; note = N1-methylpseudouracil
  modified_base 787: mod_base = OTHER; note = N1-methylpseudouracil
  modified_base 792: mod_base = OTHER; note = N1-methylpseudouracil
  modified_base 793: mod_base = OTHER; note = N1-methylpseudouracil
  modified_base 794: mod_base = OTHER; note = N1-methylpseudouracil
  modified_base 796: mod_base = OTHER; note = N1-methylpseudouracil
  modified_base 799: mod_base = OTHER; note = N1-methylpseudouracil
  modified_base 802: mod_base = OTHER; note = N1-methylpseudouracil
  modified_base 805: mod_base = OTHER; note = N1-methylpseudouracil
  modified_base 811: mod_base = OTHER; note = N1-methylpseudouracil
  modified_base 813: mod_base = OTHER; note = N1-methylpseudouracil
  modified_base 814: mod_base = OTHER; note = N1-methylpseudouracil
  modified_base 821: mod_base = OTHER; note = N1-methylpseudouracil
  modified_base 826: mod_base = OTHER; note = N1-methylpseudouracil
  modified_base 835: mod_base = OTHER; note = N1-methylpseudouracil
  modified_base 838: mod_base = OTHER; note = N1-methylpseudouracil
  modified_base 841: mod_base = OTHER; note = N1-methylpseudouracil
  modified_base 846: mod_base = OTHER; note = N1-methylpseudouracil
  modified_base 854: mod_base = OTHER; note = N1-methylpseudouracil
  modified_base 871: mod_base = OTHER; note = N1-methylpseudouracil
  modified_base 883: mod_base = OTHER; note = N1-methylpseudouracil
  modified_base 886: mod_base = OTHER; note = N1-methylpseudouracil
  modified_base 889: mod_base = OTHER; note = N1-methylpseudouracil
  modified_base 893: mod_base = OTHER; note = N1-methylpseudouracil
  modified_base 901: mod_base = OTHER; note = N1-methylpseudouracil
  modified_base 904: mod_base = OTHER; note = N1-methylpseudouracil
  modified_base 913: mod_base = OTHER; note = N1-methylpseudouracil
  modified_base 922: mod_base = OTHER; note = N1-methylpseudouracil
  modified_base 929: mod_base = OTHER; note = N1-methylpseudouracil
  modified_base 930: mod_base = OTHER; note = N1-methylpseudouracil
  modified_base 933: mod_base = OTHER; note = N1-methylpseudouracil
  modified_base 935: mod_base = OTHER; note = N1-methylpseudouracil
  modified_base 936: mod_base = OTHER; note = N1-methylpseudouracil
  modified_base 949: mod_base = OTHER; note = N1-methylpseudouracil
  modified_base 958: mod_base = OTHER; note = N1-methylpseudouracil
  modified_base 961: mod_base = OTHER; note = N1-methylpseudouracil
  modified_base 970: mod_base = OTHER; note = N1-methylpseudouracil
  modified_base 985: mod_base = OTHER; note = N1-methylpseudouracil
  modified_base 991: mod_base = OTHER; note = N1-methylpseudouracil
  modified_base 995: mod_base = OTHER; note = N1-methylpseudouracil
  modified_base 1008: mod_base = OTHER; note = N1-methylpseudouracil
  modified_base 1012: mod_base = OTHER; note = N1-methylpseudouracil
  modified_base 1017: mod_base = OTHER; note = N1-methylpseudouracil
  modified_base 1019: mod_base = OTHER; note = N1-methylpseudouracil
  modified_base 1020: mod_base = OTHER; note = N1-methylpseudouracil
  modified_base 1021: mod_base = OTHER; note = N1-methylpseudouracil
  modified_base 1026: mod_base = OTHER; note = N1-methylpseudouracil
  modified_base 1035: mod_base = OTHER; note = N1-methylpseudouracil
  modified_base 1036: mod_base = OTHER; note = N1-methylpseudouracil
  modified_base 1038: mod_base = OTHER; note = N1-methylpseudouracil
  modified_base 1039: mod_base = OTHER; note = N1-methylpseudouracil
  modified_base 1041: mod_base = OTHER; note = N1-methylpseudouracil
  modified_base 1042: mod_base = OTHER; note = N1-methylpseudouracil
  modified_base 1050: mod_base = OTHER; note = N1-methylpseudouracil
  modified_base 1051: mod_base = OTHER; note = N1-methylpseudouracil
  modified_base 1053: mod_base = OTHER; note = N1-methylpseudouracil
  modified_base 1054: mod_base = OTHER; note = N1-methylpseudouracil
  modified_base 1057: mod_base = OTHER; note = N1-methylpseudouracil
  modified_base 1060: mod_base = OTHER; note = N1-methylpseudouracil
  modified_base 1062: mod_base = OTHER; note = N1-methylpseudouracil
  modified_base 1063: mod_base = OTHER; note = N1-methylpseudouracil
  modified_base 1066: mod_base = OTHER; note = N1-methylpseudouracil
  modified_base 1072: mod_base = OTHER; note = N1-methylpseudouracil
  modified_base 1075: mod_base = OTHER; note = N1-methylpseudouracil
  modified_base 1080: mod_base = OTHER; note = N1-methylpseudouracil
  modified_base 1087: mod_base = OTHER; note = N1-methylpseudouracil
  modified_base 1090: mod_base = OTHER; note = N1-methylpseudouracil
  modified_base 1099: mod_base = OTHER; note = N1-methylpseudouracil
  modified_base 1102: mod_base = OTHER; note = N1-methylpseudouracil
  modified_base 1105: mod_base = OTHER; note = N1-methylpseudouracil
  modified_base 1114: mod_base = OTHER; note = N1-methylpseudouracil
  modified_base 1116: mod_base = OTHER; note = N1-methylpseudouracil
  modified_base 1117: mod_base = OTHER; note = N1-methylpseudouracil
  modified_base 1126: mod_base = OTHER; note = N1-methylpseudouracil
  modified_base 1127: mod_base = OTHER; note = N1-methylpseudouracil
  modified_base 1131: mod_base = OTHER; note = N1-methylpseudouracil
  modified_base 1132: mod_base = OTHER; note = N1-methylpseudouracil
  modified_base 1134: mod_base = OTHER; note = N1-methylpseudouracil
  modified_base 1138: mod_base = OTHER; note = N1-methylpseudouracil
  modified_base 1141: mod_base = OTHER; note = N1-methylpseudouracil
  modified_base 1144: mod_base = OTHER; note = N1-methylpseudouracil
  modified_base 1150: mod_base = OTHER; note = N1-methylpseudouracil
  modified_base 1156: mod_base = OTHER; note = N1-methylpseudouracil
  modified_base 1167: mod_base = OTHER; note = N1-methylpseudouracil
  modified_base 1168: mod_base = OTHER; note = N1-methylpseudouracil
  modified_base 1172: mod_base = OTHER; note = N1-methylpseudouracil
  modified_base 1173: mod_base = OTHER; note = N1-methylpseudouracil
  modified_base 1180: mod_base = OTHER; note = N1-methylpseudouracil
  modified_base 1187: mod_base = OTHER; note = N1-methylpseudouracil
  modified_base 1188: mod_base = OTHER; note = N1-methylpseudouracil
  modified_base 1191: mod_base = OTHER; note = N1-methylpseudouracil
  modified_base 1201: mod_base = OTHER; note = N1-methylpseudouracil
  modified_base 1210: mod_base = OTHER; note = N1-methylpseudouracil
  modified_base 1219: mod_base = OTHER; note = N1-methylpseudouracil
  modified_base 1227: mod_base = OTHER; note = N1-methylpseudouracil
  modified_base 1228: mod_base = OTHER; note = N1-methylpseudouracil
  modified_base 1229: mod_base = OTHER; note = N1-methylpseudouracil
  modified_base 1231: mod_base = OTHER; note = N1-methylpseudouracil
  modified_base 1245: mod_base = OTHER; note = N1-methylpseudouracil
  modified_base 1247: mod_base = OTHER; note = N1-methylpseudouracil
  modified_base 1255: mod_base = OTHER; note = N1-methylpseudouracil
  modified_base 1260: mod_base = OTHER; note = N1-methylpseudouracil
  modified_base 1267: mod_base = OTHER; note = N1-methylpseudouracil
  modified_base 1282: mod_base = OTHER; note = N1-methylpseudouracil
  modified_base 1285: mod_base = OTHER; note = N1-methylpseudouracil
  modified_base 1288: mod_base = OTHER; note = N1-methylpseudouracil
  modified_base 1297: mod_base = OTHER; note = N1-methylpseudouracil
  modified_base 1305: mod_base = OTHER; note = N1-methylpseudouracil
  modified_base 1306: mod_base = OTHER; note = N1-methylpseudouracil
  modified_base 1308: mod_base = OTHER; note = N1-methylpseudouracil
  modified_base 1320: mod_base = OTHER; note = N1-methylpseudouracil
  modified_base 1321: mod_base = OTHER; note = N1-methylpseudouracil
  modified_base 1330: mod_base = OTHER; note = N1-methylpseudouracil
  modified_base 1332: mod_base = OTHER; note = N1-methylpseudouracil
  modified_base 1333: mod_base = OTHER; note = N1-methylpseudouracil
  modified_base 1355: mod_base = OTHER; note = N1-methylpseudouracil
  modified_base 1386: mod_base = OTHER; note = N1-methylpseudouracil
  modified_base 1390: mod_base = OTHER; note = N1-methylpseudouracil
  modified_base 1392: mod_base = OTHER; note = N1-methylpseudouracil
  modified_base 1393: mod_base = OTHER; note = N1-methylpseudouracil
  modified_base 1395: mod_base = OTHER; note = N1-methylpseudouracil
  modified_base 1396: mod_base = OTHER; note = N1-methylpseudouracil
  modified_base 1404: mod_base = OTHER; note = N1-methylpseudouracil
  modified_base 1405: mod_base = OTHER; note = N1-methylpseudouracil
  modified_base 1406: mod_base = OTHER; note = N1-methylpseudouracil
  modified_base 1411: mod_base = OTHER; note = N1-methylpseudouracil
  modified_base 1414: mod_base = OTHER; note = N1-methylpseudouracil
  modified_base 1424: mod_base = OTHER; note = N1-methylpseudouracil
  modified_base 1426: mod_base = OTHER; note = N1-methylpseudouracil
  modified_base 1429: mod_base = OTHER; note = N1-methylpseudouracil
  modified_base 1438: mod_base = OTHER; note = N1-methylpseudouracil
  modified_base 1443: mod_base = OTHER; note = N1-methylpseudouracil
  modified_base 1444: mod_base = OTHER; note = N1-methylpseudouracil
  modified_base 1450: mod_base = OTHER; note = N1-methylpseudouracil
  modified_base 1465: mod_base = OTHER; note = N1-methylpseudouracil
  modified_base 1468: mod_base = OTHER; note = N1-methylpseudouracil
  modified_base 1474: mod_base = OTHER; note = N1-methylpseudouracil
  modified_base 1482: mod_base = OTHER; note = N1-methylpseudouracil
  modified_base 1484: mod_base = OTHER; note = N1-methylpseudouracil
  modified_base 1507: mod_base = OTHER; note = N1-methylpseudouracil
  modified_base 1510: mod_base = OTHER; note = N1-methylpseudouracil
  modified_base 1513: mod_base = OTHER; note = N1-methylpseudouracil
  modified_base 1516: mod_base = OTHER; note = N1-methylpseudouracil
  modified_base 1519: mod_base = OTHER; note = N1-methylpseudouracil
  modified_base 1522: mod_base = OTHER; note = N1-methylpseudouracil
  modified_base 1531: mod_base = OTHER; note = N1-methylpseudouracil
  modified_base 1552: mod_base = OTHER; note = N1-methylpseudouracil
  modified_base 1570: mod_base = OTHER; note = N1-methylpseudouracil
  modified_base 1572: mod_base = OTHER; note = N1-methylpseudouracil
  modified_base 1575: mod_base = OTHER; note = N1-methylpseudouracil
  modified_base 1576: mod_base = OTHER; note = N1-methylpseudouracil
  modified_base 1578: mod_base = OTHER; note = N1-methylpseudouracil
  modified_base 1581: mod_base = OTHER; note = N1-methylpseudouracil
  modified_base 1587: mod_base = OTHER; note = N1-methylpseudouracil
  modified_base 1588: mod_base = OTHER; note = N1-methylpseudouracil
  modified_base 1590: mod_base = OTHER; note = N1-methylpseudouracil
  modified_base 1593: mod_base = OTHER; note = N1-methylpseudouracil
  modified_base 1597: mod_base = OTHER; note = N1-methylpseudouracil
  modified_base 1600: mod_base = OTHER; note = N1-methylpseudouracil
  modified_base 1612: mod_base = OTHER; note = N1-methylpseudouracil
  modified_base 1624: mod_base = OTHER; note = N1-methylpseudouracil
  modified_base 1627: mod_base = OTHER; note = N1-methylpseudouracil
  modified_base 1629: mod_base = OTHER; note = N1-methylpseudouracil
  modified_base 1630: mod_base = OTHER; note = N1-methylpseudouracil
  modified_base 1636: mod_base = OTHER; note = N1-methylpseudouracil
  modified_base 1641: mod_base = OTHER; note = N1-methylpseudouracil
  modified_base 1650: mod_base = OTHER; note = N1-methylpseudouracil
  modified_base 1656: mod_base = OTHER; note = N1-methylpseudouracil
  modified_base 1666: mod_base = OTHER; note = N1-methylpseudouracil
  modified_base 1669: mod_base = OTHER; note = N1-methylpseudouracil
  modified_base 1677: mod_base = OTHER; note = N1-methylpseudouracil
  modified_base 1684: mod_base = OTHER; note = N1-methylpseudouracil
  modified_base 1696: mod_base = OTHER; note = N1-methylpseudouracil
  modified_base 1698: mod_base = OTHER; note = N1-methylpseudouracil
  modified_base 1704: mod_base = OTHER; note = N1-methylpseudouracil
  modified_base 1705: mod_base = OTHER; note = N1-methylpseudouracil
  modified_base 1706: mod_base = OTHER; note = N1-methylpseudouracil
  modified_base 1723: mod_base = OTHER; note = N1-methylpseudouracil
  modified_base 1724: mod_base = OTHER; note = N1-methylpseudouracil
  modified_base 1726: mod_base = OTHER; note = N1-methylpseudouracil
  modified_base 1729: mod_base = OTHER; note = N1-methylpseudouracil
  modified_base 1744: mod_base = OTHER; note = N1-methylpseudouracil
  modified_base 1750: mod_base = OTHER; note = N1-methylpseudouracil
  modified_base 1752: mod_base = OTHER; note = N1-methylpseudouracil
  modified_base 1757: mod_base = OTHER; note = N1-methylpseudouracil
  modified_base 1766: mod_base = OTHER; note = N1-methylpseudouracil
  modified_base 1774: mod_base = OTHER; note = N1-methylpseudouracil
  modified_base 1776: mod_base = OTHER; note = N1-methylpseudouracil
  modified_base 1780: mod_base = OTHER; note = N1-methylpseudouracil
  modified_base 1790: mod_base = OTHER; note = N1-methylpseudouracil
  modified_base 1792: mod_base = OTHER; note = N1-methylpseudouracil
  modified_base 1794: mod_base = OTHER; note = N1-methylpseudouracil
  modified_base 1810: mod_base = OTHER; note = N1-methylpseudouracil
  modified_base 1812: mod_base = OTHER; note = N1-methylpseudouracil
  modified_base 1816: mod_base = OTHER; note = N1-methylpseudouracil
  modified_base 1819: mod_base = OTHER; note = N1-methylpseudouracil
  modified_base 1829: mod_base = OTHER; note = N1-methylpseudouracil
  modified_base 1830: mod_base = OTHER; note = N1-methylpseudouracil
  modified_base 1831: mod_base = OTHER; note = N1-methylpseudouracil
  modified_base 1832: mod_base = OTHER; note = N1-methylpseudouracil
  modified_base 1836: mod_base = OTHER; note = N1-methylpseudouracil
  modified_base 1840: mod_base = OTHER; note = N1-methylpseudouracil
  modified_base 1846: mod_base = OTHER; note = N1-methylpseudouracil
  modified_base 1849: mod_base = OTHER; note = N1-methylpseudouracil
  modified_base 1864: mod_base = OTHER; note = N1-methylpseudouracil
  modified_base 1866: mod_base = OTHER; note = N1-methylpseudouracil
  modified_base 1867: mod_base = OTHER; note = N1-methylpseudouracil
  modified_base 1872: mod_base = OTHER; note = N1-methylpseudouracil
  modified_base 1875: mod_base = OTHER; note = N1-methylpseudouracil
  modified_base 1879: mod_base = OTHER; note = N1-methylpseudouracil
  modified_base 1881: mod_base = OTHER; note = N1-methylpseudouracil
  modified_base 1883: mod_base = OTHER; note = N1-methylpseudouracil
  modified_base 1888: mod_base = OTHER; note = N1-methylpseudouracil
  modified_base 1891: mod_base = OTHER; note = N1-methylpseudouracil
  modified_base 1909: mod_base = OTHER; note = N1-methylpseudouracil
  modified_base 1912: mod_base = OTHER; note = N1-methylpseudouracil
  modified_base 1915: mod_base = OTHER; note = N1-methylpseudouracil
  modified_base 1927: mod_base = OTHER; note = N1-methylpseudouracil
  modified_base 1934: mod_base = OTHER; note = N1-methylpseudouracil
  modified_base 1936: mod_base = OTHER; note = N1-methylpseudouracil
  modified_base 1954: mod_base = OTHER; note = N1-methylpseudouracil
  modified_base 1957: mod_base = OTHER; note = N1-methylpseudouracil
  modified_base 1960: mod_base = OTHER; note = N1-methylpseudouracil
  modified_base 1963: mod_base = OTHER; note = N1-methylpseudouracil
  modified_base 1974: mod_base = OTHER; note = N1-methylpseudouracil
  modified_base 1980: mod_base = OTHER; note = N1-methylpseudouracil
  modified_base 1983: mod_base = OTHER; note = N1-methylpseudouracil
  modified_base 1984: mod_base = OTHER; note = N1-methylpseudouracil
  modified_base 1986: mod_base = OTHER; note = N1-methylpseudouracil
  modified_base 1995: mod_base = OTHER; note = N1-methylpseudouracil
  modified_base 1996: mod_base = OTHER; note = N1-methylpseudouracil
  modified_base 2005: mod_base = OTHER; note = N1-methylpseudouracil
  modified_base 2014: mod_base = OTHER; note = N1-methylpseudouracil
  modified_base 2025: mod_base = OTHER; note = N1-methylpseudouracil
  modified_base 2026: mod_base = OTHER; note = N1-methylpseudouracil
  modified_base 2031: mod_base = OTHER; note = N1-methylpseudouracil
  modified_base 2038: mod_base = OTHER; note = N1-methylpseudouracil
  modified_base 2041: mod_base = OTHER; note = N1-methylpseudouracil
  modified_base 2046: mod_base = OTHER; note = N1-methylpseudouracil
  modified_base 2051: mod_base = OTHER; note = N1-methylpseudouracil
  modified_base 2055: mod_base = OTHER; note = N1-methylpseudouracil
  modified_base 2056: mod_base = OTHER; note = N1-methylpseudouracil
  modified_base 2064: mod_base = OTHER; note = N1-methylpseudouracil
  modified_base 2065: mod_base = OTHER; note = N1-methylpseudouracil
  modified_base 2067: mod_base = OTHER; note = N1-methylpseudouracil
  modified_base 2085: mod_base = OTHER; note = N1-methylpseudouracil
  modified_base 2089: mod_base = OTHER; note = N1-methylpseudouracil
  modified_base 2090: mod_base = OTHER; note = N1-methylpseudouracil
  modified_base 2092: mod_base = OTHER; note = N1-methylpseudouracil
  modified_base 2104: mod_base = OTHER; note = N1-methylpseudouracil
  modified_base 2112: mod_base = OTHER; note = N1-methylpseudouracil
  modified_base 2113: mod_base = OTHER; note = N1-methylpseudouracil
  modified_base 2115: mod_base = OTHER; note = N1-methylpseudouracil
  modified_base 2119: mod_base = OTHER; note = N1-methylpseudouracil
  modified_base 2137: mod_base = OTHER; note = N1-methylpseudouracil
  modified_base 2142: mod_base = OTHER; note = N1-methylpseudouracil
  modified_base 2166: mod_base = OTHER; note = N1-methylpseudouracil
  modified_base 2167: mod_base = OTHER; note = N1-methylpseudouracil
  modified_base 2184: mod_base = OTHER; note = N1-methylpseudouracil
  modified_base 2185: mod_base = OTHER; note = N1-methylpseudouracil
  modified_base 2205: mod_base = OTHER; note = N1-methylpseudouracil
  modified_base 2209: mod_base = OTHER; note = N1-methylpseudouracil
  modified_base 2212: mod_base = OTHER; note = N1-methylpseudouracil
  modified_base 2221: mod_base = OTHER; note = N1-methylpseudouracil
  modified_base 2230: mod_base = OTHER; note = N1-methylpseudouracil
  modified_base 2238: mod_base = OTHER; note = N1-methylpseudouracil
  modified_base 2239: mod_base = OTHER; note = N1-methylpseudouracil
  modified_base 2245: mod_base = OTHER; note = N1-methylpseudouracil
  modified_base 2248: mod_base = OTHER; note = N1-methylpseudouracil
  modified_base 2261: mod_base = OTHER; note = N1-methylpseudouracil
  modified_base 2263: mod_base = OTHER; note = N1-methylpseudouracil
  modified_base 2269: mod_base = OTHER; note = N1-methylpseudouracil
  modified_base 2278: mod_base = OTHER; note = N1-methylpseudouracil
  modified_base 2302: mod_base = OTHER; note = N1-methylpseudouracil
  modified_base 2314: mod_base = OTHER; note = N1-methylpseudouracil
  modified_base 2316: mod_base = OTHER; note = N1-methylpseudouracil
  modified_base 2320: mod_base = OTHER; note = N1-methylpseudouracil
  modified_base 2323: mod_base = OTHER; note = N1-methylpseudouracil
  modified_base 2350: mod_base = OTHER; note = N1-methylpseudouracil
  modified_base 2353: mod_base = OTHER; note = N1-methylpseudouracil
  modified_base 2362: mod_base = OTHER; note = N1-methylpseudouracil
  modified_base 2364: mod_base = OTHER; note = N1-methylpseudouracil
  modified_base 2368: mod_base = OTHER; note = N1-methylpseudouracil
  modified_base 2371: mod_base = OTHER; note = N1-methylpseudouracil
  modified_base 2373: mod_base = OTHER; note = N1-methylpseudouracil
  modified_base 2378: mod_base = OTHER; note = N1-methylpseudouracil
  modified_base 2389: mod_base = OTHER; note = N1-methylpseudouracil
  modified_base 2413: mod_base = OTHER; note = N1-methylpseudouracil
  modified_base 2416: mod_base = OTHER; note = N1-methylpseudouracil
  modified_base 2422: mod_base = OTHER; note = N1-methylpseudouracil
  modified_base 2425: mod_base = OTHER; note = N1-methylpseudouracil
  modified_base 2437: mod_base = OTHER; note = N1-methylpseudouracil
  modified_base 2453: mod_base = OTHER; note = N1-methylpseudouracil
  modified_base 2455: mod_base = OTHER; note = N1-methylpseudouracil
  modified_base 2468: mod_base = OTHER; note = N1-methylpseudouracil
  modified_base 2488: mod_base = OTHER; note = N1-methylpseudouracil
  modified_base 2494: mod_base = OTHER; note = N1-methylpseudouracil
  modified_base 2498: mod_base = OTHER; note = N1-methylpseudouracil
  modified_base 2512: mod_base = OTHER; note = N1-methylpseudouracil
  modified_base 2521: mod_base = OTHER; note = N1-methylpseudouracil
  modified_base 2527: mod_base = OTHER; note = N1-methylpseudouracil
  modified_base 2529: mod_base = OTHER; note = N1-methylpseudouracil
  modified_base 2542: mod_base = OTHER; note = N1-methylpseudouracil
  modified_base 2560: mod_base = OTHER; note = N1-methylpseudouracil
  modified_base 2566: mod_base = OTHER; note = N1-methylpseudouracil
  modified_base 2578: mod_base = OTHER; note = N1-methylpseudouracil
  modified_base 2593: mod_base = OTHER; note = N1-methylpseudouracil
  modified_base 2601: mod_base = OTHER; note = N1-methylpseudouracil
  modified_base 2604: mod_base = OTHER; note = N1-methylpseudouracil
  modified_base 2605: mod_base = OTHER; note = N1-methylpseudouracil
  modified_base 2607: mod_base = OTHER; note = N1-methylpseudouracil
  modified_base 2608: mod_base = OTHER; note = N1-methylpseudouracil
  modified_base 2617: mod_base = OTHER; note = N1-methylpseudouracil
  modified_base 2622: mod_base = OTHER; note = N1-methylpseudouracil
  modified_base 2626: mod_base = OTHER; note = N1-methylpseudouracil
  modified_base 2635: mod_base = OTHER; note = N1-methylpseudouracil
  modified_base 2643: mod_base = OTHER; note = N1-methylpseudouracil
  modified_base 2652: mod_base = OTHER; note = N1-methylpseudouracil
  modified_base 2656: mod_base = OTHER; note = N1-methylpseudouracil
  modified_base 2661: mod_base = OTHER; note = N1-methylpseudouracil
  modified_base 2665: mod_base = OTHER; note = N1-methylpseudouracil
  modified_base 2671: mod_base = OTHER; note = N1-methylpseudouracil
  modified_base 2683: mod_base = OTHER; note = N1-methylpseudouracil
  modified_base 2686: mod_base = OTHER; note = N1-methylpseudouracil
  modified_base 2688: mod_base = OTHER; note = N1-methylpseudouracil
  modified_base 2689: mod_base = OTHER; note = N1-methylpseudouracil
  modified_base 2692: mod_base = OTHER; note = N1-methylpseudouracil
  modified_base 2695: mod_base = OTHER; note = N1-methylpseudouracil
  modified_base 2698: mod_base = OTHER; note = N1-methylpseudouracil
  modified_base 2700: mod_base = OTHER; note = N1-methylpseudouracil
  modified_base 2703: mod_base = OTHER; note = N1-methylpseudouracil
  modified_base 2707: mod_base = OTHER; note = N1-methylpseudouracil
  modified_base 2710: mod_base = OTHER; note = N1-methylpseudouracil
  modified_base 2713: mod_base = OTHER; note = N1-methylpseudouracil
  modified_base 2715: mod_base = OTHER; note = N1-methylpseudouracil
  modified_base 2716: mod_base = OTHER; note = N1-methylpseudouracil
  modified_base 2718: mod_base = OTHER; note = N1-methylpseudouracil
  modified_base 2719: mod_base = OTHER; note = N1-methylpseudouracil
  modified_base 2728: mod_base = OTHER; note = N1-methylpseudouracil
  modified_base 2736: mod_base = OTHER; note = N1-methylpseudouracil
  modified_base 2740: mod_base = OTHER; note = N1-methylpseudouracil
  modified_base 2743: mod_base = OTHER; note = N1-methylpseudouracil
  modified_base 2746: mod_base = OTHER; note = N1-methylpseudouracil
  modified_base 2749: mod_base = OTHER; note = N1-methylpseudouracil
  modified_base 2751: mod_base = OTHER; note = N1-methylpseudouracil
  modified_base 2755: mod_base = OTHER; note = N1-methylpseudouracil
  modified_base 2758: mod_base = OTHER; note = N1-methylpseudouracil
  modified_base 2765: mod_base = OTHER; note = N1-methylpseudouracil
  modified_base 2773: mod_base = OTHER; note = N1-methylpseudouracil
  modified_base 2790: mod_base = OTHER; note = N1-methylpseudouracil
  modified_base 2814: mod_base = OTHER; note = N1-methylpseudouracil
  modified_base 2821: mod_base = OTHER; note = N1-methylpseudouracil
  modified_base 2824: mod_base = OTHER; note = N1-methylpseudouracil
  modified_base 2827: mod_base = OTHER; note = N1-methylpseudouracil
  modified_base 2832: mod_base = OTHER; note = N1-methylpseudouracil
  modified_base 2844: mod_base = OTHER; note = N1-methylpseudouracil
  modified_base 2847: mod_base = OTHER; note = N1-methylpseudouracil
  modified_base 2851: mod_base = OTHER; note = N1-methylpseudouracil
  modified_base 2853: mod_base = OTHER; note = N1-methylpseudouracil
  modified_base 2854: mod_base = OTHER; note = N1-methylpseudouracil
  modified_base 2856: mod_base = OTHER; note = N1-methylpseudouracil
  modified_base 2860: mod_base = OTHER; note = N1-methylpseudouracil
  modified_base 2862: mod_base = OTHER; note = N1-methylpseudouracil
  modified_base 2866: mod_base = OTHER; note = N1-methylpseudouracil
  modified_base 2872: mod_base = OTHER; note = N1-methylpseudouracil
  modified_base 2884: mod_base = OTHER; note = N1-methylpseudouracil
  modified_base 2887: mod_base = OTHER; note = N1-methylpseudouracil
  modified_base 2893: mod_base = OTHER; note = N1-methylpseudouracil
  modified_base 2898: mod_base = OTHER; note = N1-methylpseudouracil
  modified_base 2899: mod_base = OTHER; note = N1-methylpseudouracil
  modified_base 2901: mod_base = OTHER; note = N1-methylpseudouracil
  modified_base 2902: mod_base = OTHER; note = N1-methylpseudouracil
  modified_base 2911: mod_base = OTHER; note = N1-methylpseudouracil
  modified_base 2915: mod_base = OTHER; note = N1-methylpseudouracil
  modified_base 2917: mod_base = OTHER; note = N1-methylpseudouracil
  modified_base 2920: mod_base = OTHER; note = N1-methylpseudouracil
  modified_base 2929: mod_base = OTHER; note = N1-methylpseudouracil
  modified_base 2932: mod_base = OTHER; note = N1-methylpseudouracil
  modified_base 2938: mod_base = OTHER; note = N1-methylpseudouracil
  modified_base 2947: mod_base = OTHER; note = N1-methylpseudouracil
  modified_base 2950: mod_base = OTHER; note = N1-methylpseudouracil
  modified_base 2962: mod_base = OTHER; note = N1-methylpseudouracil
  modified_base 2965: mod_base = OTHER; note = N1-methylpseudouracil
  modified_base 2974: mod_base = OTHER; note = N1-methylpseudouracil
  modified_base 2977: mod_base = OTHER; note = N1-methylpseudouracil
  modified_base 2984: mod_base = OTHER; note = N1-methylpseudouracil
  modified_base 2989: mod_base = OTHER; note = N1-methylpseudouracil
  modified_base 2991: mod_base = OTHER; note = N1-methylpseudouracil
  modified_base 2998: mod_base = OTHER; note = N1-methylpseudouracil
  modified_base 3007: mod_base = OTHER; note = N1-methylpseudouracil
  modified_base 3022: mod_base = OTHER; note = N1-methylpseudouracil
  modified_base 3025: mod_base = OTHER; note = N1-methylpseudouracil
  modified_base 3033: mod_base = OTHER; note = N1-methylpseudouracil
  modified_base 3034: mod_base = OTHER; note = N1-methylpseudouracil
  modified_base 3046: mod_base = OTHER; note = N1-methylpseudouracil
  modified_base 3052: mod_base = OTHER; note = N1-methylpseudouracil
  modified_base 3053: mod_base = OTHER; note = N1-methylpseudouracil
  modified_base 3055: mod_base = OTHER; note = N1-methylpseudouracil
  modified_base 3062: mod_base = OTHER; note = N1-methylpseudouracil
  modified_base 3064: mod_base = OTHER; note = N1-methylpseudouracil
  modified_base 3067: mod_base = OTHER; note = N1-methylpseudouracil
  modified_base 3073: mod_base = OTHER; note = N1-methylpseudouracil
  modified_base 3079: mod_base = OTHER; note = N1-methylpseudouracil
  modified_base 3081: mod_base = OTHER; note = N1-methylpseudouracil
  modified_base 3082: mod_base = OTHER; note = N1-methylpseudouracil
  modified_base 3087: mod_base = OTHER; note = N1-methylpseudouracil
  modified_base 3088: mod_base = OTHER; note = N1-methylpseudouracil
  modified_base 3091: mod_base = OTHER; note = N1-methylpseudouracil
  modified_base 3097: mod_base = OTHER; note = N1-methylpseudouracil
  modified_base 3100: mod_base = OTHER; note = N1-methylpseudouracil
  modified_base 3103: mod_base = OTHER; note = N1-methylpseudouracil
  modified_base 3106: mod_base = OTHER; note = N1-methylpseudouracil
  modified_base 3109: mod_base = OTHER; note = N1-methylpseudouracil
  modified_base 3112: mod_base = OTHER; note = N1-methylpseudouracil
  modified_base 3121: mod_base = OTHER; note = N1-methylpseudouracil
  modified_base 3127: mod_base = OTHER; note = N1-methylpseudouracil
  modified_base 3130: mod_base = OTHER; note = N1-methylpseudouracil
  modified_base 3136: mod_base = OTHER; note = N1-methylpseudouracil
  modified_base 3139: mod_base = OTHER; note = N1-methylpseudouracil
  modified_base 3147: mod_base = OTHER; note = N1-methylpseudouracil
  modified_base 3151: mod_base = OTHER; note = N1-methylpseudouracil
  modified_base 3153: mod_base = OTHER; note = N1-methylpseudouracil
  modified_base 3154: mod_base = OTHER; note = N1-methylpseudouracil
  modified_base 3157: mod_base = OTHER; note = N1-methylpseudouracil
  modified_base 3166: mod_base = OTHER; note = N1-methylpseudouracil
  modified_base 3172: mod_base = OTHER; note = N1-methylpseudouracil
  modified_base 3175: mod_base = OTHER; note = N1-methylpseudouracil
  modified_base 3178: mod_base = OTHER; note = N1-methylpseudouracil
  modified_base 3183: mod_base = OTHER; note = N1-methylpseudouracil
  modified_base 3184: mod_base = OTHER; note = N1-methylpseudouracil
  modified_base 3187: mod_base = OTHER; note = N1-methylpseudouracil
  modified_base 3190: mod_base = OTHER; note = N1-methylpseudouracil
  modified_base 3193: mod_base = OTHER; note = N1-methylpseudouracil
  modified_base 3201: mod_base = OTHER; note = N1-methylpseudouracil
  modified_base 3204: mod_base = OTHER; note = N1-methylpseudouracil
  modified_base 3205: mod_base = OTHER; note = N1-methylpseudouracil
  modified_base 3208: mod_base = OTHER; note = N1-methylpseudouracil
  modified_base 3216: mod_base = OTHER; note = N1-methylpseudouracil
  modified_base 3226: mod_base = OTHER; note = N1-methylpseudouracil
  modified_base 3235: mod_base = OTHER; note = N1-methylpseudouracil
  modified_base 3259: mod_base = OTHER; note = N1-methylpseudouracil
  modified_base 3261: mod_base = OTHER; note = N1-methylpseudouracil
  modified_base 3262: mod_base = OTHER; note = N1-methylpseudouracil
  modified_base 3271: mod_base = OTHER; note = N1-methylpseudouracil
  modified_base 3274: mod_base = OTHER; note = N1-methylpseudouracil
  modified_base 3278: mod_base = OTHER; note = N1-methylpseudouracil
  modified_base 3283: mod_base = OTHER; note = N1-methylpseudouracil
  modified_base 3292: mod_base = OTHER; note = N1-methylpseudouracil
  modified_base 3294: mod_base = OTHER; note = N1-methylpseudouracil
  modified_base 3301: mod_base = OTHER; note = N1-methylpseudouracil
  modified_base 3309: mod_base = OTHER; note = N1-methylpseudouracil
  modified_base 3310: mod_base = OTHER; note = N1-methylpseudouracil
  modified_base 3324: mod_base = OTHER; note = N1-methylpseudouracil
  modified_base 3327: mod_base = OTHER; note = N1-methylpseudouracil
  modified_base 3328: mod_base = OTHER; note = N1-methylpseudouracil
  modified_base 3337: mod_base = OTHER; note = N1-methylpseudouracil
  modified_base 3339: mod_base = OTHER; note = N1-methylpseudouracil
  modified_base 3340: mod_base = OTHER; note = N1-methylpseudouracil
  modified_base 3350: mod_base = OTHER; note = N1-methylpseudouracil
  modified_base 3352: mod_base = OTHER; note = N1-methylpseudouracil
  modified_base 3358: mod_base = OTHER; note = N1-methylpseudouracil
  modified_base 3372: mod_base = OTHER; note = N1-methylpseudouracil
  modified_base 3375: mod_base = OTHER; note = N1-methylpseudouracil
  modified_base 3376: mod_base = OTHER; note = N1-methylpseudouracil
  modified_base 3379: mod_base = OTHER; note = N1-methylpseudouracil
  modified_base 3381: mod_base = OTHER; note = N1-methylpseudouracil
  modified_base 3385: mod_base = OTHER; note = N1-methylpseudouracil
  modified_base 3394: mod_base = OTHER; note = N1-methylpseudouracil
  modified_base 3399: mod_base = OTHER; note = N1-methylpseudouracil
  modified_base 3402: mod_base = OTHER; note = N1-methylpseudouracil
  modified_base 3403: mod_base = OTHER; note = N1-methylpseudouracil
  modified_base 3409: mod_base = OTHER; note = N1-methylpseudouracil
  modified_base 3415: mod_base = OTHER; note = N1-methylpseudouracil
  modified_base 3421: mod_base = OTHER; note = N1-methylpseudouracil
  modified_base 3424: mod_base = OTHER; note = N1-methylpseudouracil
  modified_base 3426: mod_base = OTHER; note = N1-methylpseudouracil
  modified_base 3427: mod_base = OTHER; note = N1-methylpseudouracil
  modified_base 3430: mod_base = OTHER; note = N1-methylpseudouracil
  modified_base 3433: mod_base = OTHER; note = N1-methylpseudouracil
  modified_base 3435: mod_base = OTHER; note = N1-methylpseudouracil
  modified_base 3436: mod_base = OTHER; note = N1-methylpseudouracil
  modified_base 3438: mod_base = OTHER; note = N1-methylpseudouracil
  modified_base 3439: mod_base = OTHER; note = N1-methylpseudouracil
  modified_base 3442: mod_base = OTHER; note = N1-methylpseudouracil
  modified_base 3448: mod_base = OTHER; note = N1-methylpseudouracil
  modified_base 3453: mod_base = OTHER; note = N1-methylpseudouracil
  modified_base 3454: mod_base = OTHER; note = N1-methylpseudouracil
  modified_base 3457: mod_base = OTHER; note = N1-methylpseudouracil
  modified_base 3459: mod_base = OTHER; note = N1-methylpseudouracil
  modified_base 3463: mod_base = OTHER; note = N1-methylpseudouracil
  modified_base 3466: mod_base = OTHER; note = N1-methylpseudouracil
  modified_base 3493: mod_base = OTHER; note = N1-methylpseudouracil
  modified_base 3499: mod_base = OTHER; note = N1-methylpseudouracil
  modified_base 3502: mod_base = OTHER; note = N1-methylpseudouracil
  modified_base 3505: mod_base = OTHER; note = N1-methylpseudouracil
  modified_base 3511: mod_base = OTHER; note = N1-methylpseudouracil
  modified_base 3517: mod_base = OTHER; note = N1-methylpseudouracil
  modified_base 3521: mod_base = OTHER; note = N1-methylpseudouracil
  modified_base 3523: mod_base = OTHER; note = N1-methylpseudouracil
  modified_base 3526: mod_base = OTHER; note = N1-methylpseudouracil
  modified_base 3535: mod_base = OTHER; note = N1-methylpseudouracil
  modified_base 3540: mod_base = OTHER; note = N1-methylpseudouracil
  modified_base 3547: mod_base = OTHER; note = N1-methylpseudouracil
  modified_base 3559: mod_base = OTHER; note = N1-methylpseudouracil
  modified_base 3565: mod_base = OTHER; note = N1-methylpseudouracil
  modified_base 3574: mod_base = OTHER; note = N1-methylpseudouracil
  modified_base 3577: mod_base = OTHER; note = N1-methylpseudouracil
  modified_base 3582: mod_base = OTHER; note = N1-methylpseudouracil
  modified_base 3586: mod_base = OTHER; note = N1-methylpseudouracil
  modified_base 3588: mod_base = OTHER; note = N1-methylpseudouracil
  modified_base 3595: mod_base = OTHER; note = N1-methylpseudouracil
  modified_base 3597: mod_base = OTHER; note = N1-methylpseudouracil
  modified_base 3598: mod_base = OTHER; note = N1-methylpseudouracil
  modified_base 3603: mod_base = OTHER; note = N1-methylpseudouracil
  modified_base 3604: mod_base = OTHER; note = N1-methylpseudouracil
  modified_base 3607: mod_base = OTHER; note = N1-methylpseudouracil
  modified_base 3613: mod_base = OTHER; note = N1-methylpseudouracil
  modified_base 3651: mod_base = OTHER; note = N1-methylpseudouracil
  modified_base 3667: mod_base = OTHER; note = N1-methylpseudouracil
  modified_base 3676: mod_base = OTHER; note = N1-methylpseudouracil
  modified_base 3679: mod_base = OTHER; note = N1-methylpseudouracil
  modified_base 3682: mod_base = OTHER; note = N1-methylpseudouracil
  modified_base 3683: mod_base = OTHER; note = N1-methylpseudouracil
  modified_base 3685: mod_base = OTHER; note = N1-methylpseudouracil
  modified_base 3700: mod_base = OTHER; note = N1-methylpseudouracil
  modified_base 3715: mod_base = OTHER; note = N1-methylpseudouracil
  modified_base 3717: mod_base = OTHER; note = N1-methylpseudouracil
  modified_base 3722: mod_base = OTHER; note = N1-methylpseudouracil
  modified_base 3723: mod_base = OTHER; note = N1-methylpseudouracil
  modified_base 3736: mod_base = OTHER; note = N1-methylpseudouracil
  modified_base 3742: mod_base = OTHER; note = N1-methylpseudouracil
  modified_base 3751: mod_base = OTHER; note = N1-methylpseudouracil
  modified_base 3762: mod_base = OTHER; note = N1-methylpseudouracil
  modified_base 3784: mod_base = OTHER; note = N1-methylpseudouracil
  modified_base 3787: mod_base = OTHER; note = N1-methylpseudouracil
  modified_base 3796: mod_base = OTHER; note = N1-methylpseudouracil
  modified_base 3801: mod_base = OTHER; note = N1-methylpseudouracil
  modified_base 3802: mod_base = OTHER; note = N1-methylpseudouracil
  modified_base 3804: mod_base = OTHER; note = N1-methylpseudouracil
  modified_base 3808: mod_base = OTHER; note = N1-methylpseudouracil
  modified_base 3809: mod_base = OTHER; note = N1-methylpseudouracil
  modified_base 3815: mod_base = OTHER; note = N1-methylpseudouracil
  modified_base 3826: mod_base = OTHER; note = N1-methylpseudouracil
  modified_base 3832: mod_base = OTHER; note = N1-methylpseudouracil
  modified_base 3834: mod_base = OTHER; note = N1-methylpseudouracil
  modified_base 3835: mod_base = OTHER; note = N1-methylpseudouracil
  modified_base 3851: mod_base = OTHER; note = N1-methylpseudouracil
  modified_base 3865: mod_base = OTHER; note = N1-methylpseudouracil
  modified_base 3868: mod_base = OTHER; note = N1-methylpseudouracil
  modified_base 3870: mod_base = OTHER; note = N1-methylpseudouracil
  modified_base 3876: mod_base = OTHER; note = N1-methylpseudouracil
  modified_base 3877: mod_base = OTHER; note = N1-methylpseudouracil
  modified_base 3880: mod_base = OTHER; note = N1-methylpseudouracil
  modified_base 3886: mod_base = OTHER; note = N1-methylpseudouracil
  modified_base 3889: mod_base = OTHER; note = N1-methylpseudouracil
  modified_base 3907: mod_base = OTHER; note = N1-methylpseudouracil
  modified_base 3913: mod_base = OTHER; note = N1-methylpseudouracil
  modified_base 3922: mod_base = OTHER; note = N1-methylpseudouracil
  modified_base 3927: mod_base = OTHER; note = N1-methylpseudouracil
  modified_base 3937: mod_base = OTHER; note = N1-methylpseudouracil
  modified_base 3943: mod_base = OTHER; note = N1-methylpseudouracil
  modified_base 3951: mod_base = OTHER; note = N1-methylpseudouracil
  modified_base 3963: mod_base = OTHER; note = N1-methylpseudouracil
  modified_base 3964: mod_base = OTHER; note = N1-methylpseudouracil
  modified_base 3970: mod_base = OTHER; note = N1-methylpseudouracil
  modified_base 3973: mod_base = OTHER; note = N1-methylpseudouracil
  modified_base 3985: mod_base = OTHER; note = N1-methylpseudouracil
  modified_base 3987: mod_base = OTHER; note = N1-methylpseudouracil
  modified_base 3988: mod_base = OTHER; note = N1-methylpseudouracil
  modified_base 3989: mod_base = OTHER; note = N1-methylpseudouracil
  modified_base 3991: mod_base = OTHER; note = N1-methylpseudouracil
  modified_base 3992: mod_base = OTHER; note = N1-methylpseudouracil
  modified_base 3993: mod_base = OTHER; note = N1-methylpseudouracil
  modified_base 3994: mod_base = OTHER; note = N1-methylpseudouracil
  modified_base 3996: mod_base = OTHER; note = N1-methylpseudouracil
  modified_base 3998: mod_base = OTHER; note = N1-methylpseudouracil
  modified_base 4005: mod_base = OTHER; note = N1-methylpseudouracil
  modified_base 4006: mod_base = OTHER; note = N1-methylpseudouracil
  modified_base 4007: mod_base = OTHER; note = N1-methylpseudouracil
  modified_base 4018: mod_base = OTHER; note = N1-methylpseudouracil
  modified_base 4026: mod_base = OTHER; note = N1-methylpseudouracil
  modified_base 4035: mod_base = OTHER; note = N1-methylpseudouracil
  modified_base 4038: mod_base = OTHER; note = N1-methylpseudouracil
  modified_base 4051: mod_base = OTHER; note = N1-methylpseudouracil
  modified_base 4053: mod_base = OTHER; note = N1-methylpseudouracil
  modified_base 4060: mod_base = OTHER; note = N1-methylpseudouracil
  modified_base 4072: mod_base = OTHER; note = N1-methylpseudouracil
  modified_base 4078: mod_base = OTHER; note = N1-methylpseudouracil
  modified_base 4083: mod_base = OTHER; note = N1-methylpseudouracil
  modified_base 4087: mod_base = OTHER; note = N1-methylpseudouracil
  modified_base 4090: mod_base = OTHER; note = N1-methylpseudouracil
  modified_base 4098: mod_base = OTHER; note = N1-methylpseudouracil
  modified_base 4099: mod_base = OTHER; note = N1-methylpseudouracil
  modified_base 4111: mod_base = OTHER; note = N1-methylpseudouracil
  modified_base 4116: mod_base = OTHER; note = N1-methylpseudouracil
  modified_base 4117: mod_base = OTHER; note = N1-methylpseudouracil
  modified_base 4120: mod_base = OTHER; note = N1-methylpseudouracil
  modified_base 4123: mod_base = OTHER; note = N1-methylpseudouracil
  modified_base 4126: mod_base = OTHER; note = N1-methylpseudouracil
  modified_base 4137: mod_base = OTHER; note = N1-methylpseudouracil
  modified_base 4141: mod_base = OTHER; note = N1-methylpseudouracil
  modified_base 4144: mod_base = OTHER; note = N1-methylpseudouracil
  modified_base 4165: mod_base = OTHER; note = N1-methylpseudouracil
  modified_base 4168: mod_base = OTHER; note = N1-methylpseudouracil
  modified_base 4170: mod_base = OTHER; note = N1-methylpseudouracil
  modified_base 4174: mod_base = OTHER; note = N1-methylpseudouracil
  modified_base 4186: mod_base = OTHER; note = N1-methylpseudouracil
  modified_base 4189: mod_base = OTHER; note = N1-methylpseudouracil
  modified_base 4204: mod_base = OTHER; note = N1-methylpseudouracil
  modified_base 4207: mod_base = OTHER; note = N1-methylpseudouracil
  modified_base 4210: mod_base = OTHER; note = N1-methylpseudouracil
  modified_base 4213: mod_base = OTHER; note = N1-methylpseudouracil
  modified_base 4224: mod_base = OTHER; note = N1-methylpseudouracil
  modified_base 4234: mod_base = OTHER; note = N1-methylpseudouracil
  modified_base 4238: mod_base = OTHER; note = N1-methylpseudouracil
  modified_base 4243: mod_base = OTHER; note = N1-methylpseudouracil
  modified_base 4248: mod_base = OTHER; note = N1-methylpseudouracil
  modified_base 4255: mod_base = OTHER; note = N1-methylpseudouracil
  modified_base 4258: mod_base = OTHER; note = N1-methylpseudouracil
  modified_base 4270: mod_base = OTHER; note = N1-methylpseudouracil
  modified_base 4281: mod_base = OTHER; note = N1-methylpseudouracil
  modified_base 4282: mod_base = OTHER; note = N1-methylpseudouracil
  modified_base 4290: mod_base = OTHER; note = N1-methylpseudouracil
  modified_base 4297: mod_base = OTHER; note = N1-methylpseudouracil
  modified_base 4300: mod_base = OTHER; note = N1-methylpseudouracil
  modified_base 4303: mod_base = OTHER; note = N1-methylpseudouracil
  modified_base 4305: mod_base = OTHER; note = N1-methylpseudouracil
  modified_base 4318: mod_base = OTHER; note = N1-methylpseudouracil
  modified_base 4325: mod_base = OTHER; note = N1-methylpseudouracil
  modified_base 4327: mod_base = OTHER; note = N1-methylpseudouracil
  modified_base 4330: mod_base = OTHER; note = N1-methylpseudouracil
  modified_base 4335: mod_base = OTHER; note = N1-methylpseudouracil
  modified_base 4344: mod_base = OTHER; note = N1-methylpseudouracil
  modified_base 4345: mod_base = OTHER; note = N1-methylpseudouracil
  modified_base 4348: mod_base = OTHER; note = N1-methylpseudouracil
  modified_base 4351: mod_base = OTHER; note = N1-methylpseudouracil
  modified_base 4354: mod_base = OTHER; note = N1-methylpseudouracil
  modified_base 4369: mod_base = OTHER; note = N1-methylpseudouracil
  modified_base 4377: mod_base = OTHER; note = N1-methylpseudouracil
  modified_base 4383: mod_base = OTHER; note = N1-methylpseudouracil
  modified_base 4387: mod_base = OTHER; note = N1-methylpseudouracil
  modified_base 4396: mod_base = OTHER; note = N1-methylpseudouracil
  modified_base 4399: mod_base = OTHER; note = N1-methylpseudouracil
  modified_base 4414: mod_base = OTHER; note = N1-methylpseudouracil
  modified_base 4416: mod_base = OTHER; note = N1-methylpseudouracil
  modified_base 4417: mod_base = OTHER; note = N1-methylpseudouracil
  modified_base 4427: mod_base = OTHER; note = N1-methylpseudouracil
  modified_base 4429: mod_base = OTHER; note = N1-methylpseudouracil
  modified_base 4431: mod_base = OTHER; note = N1-methylpseudouracil
  modified_base 4433: mod_base = OTHER; note = N1-methylpseudouracil
  modified_base 4442: mod_base = OTHER; note = N1-methylpseudouracil
  modified_base 4447: mod_base = OTHER; note = N1-methylpseudouracil
  modified_base 4453: mod_base = OTHER; note = N1-methylpseudouracil
  modified_base 4455: mod_base = OTHER; note = N1-methylpseudouracil
  modified_base 4456: mod_base = OTHER; note = N1-methylpseudouracil
  modified_base 4460: mod_base = OTHER; note = N1-methylpseudouracil
  modified_base 4479: mod_base = OTHER; note = N1-methylpseudouracil
  modified_base 4485: mod_base = OTHER; note = N1-methylpseudouracil
  modified_base 4487: mod_base = OTHER; note = N1-methylpseudouracil
  modified_base 4498: mod_base = OTHER; note = N1-methylpseudouracil
  modified_base 4507: mod_base = OTHER; note = N1-methylpseudouracil
  modified_base 4531: mod_base = OTHER; note = N1-methylpseudouracil
  modified_base 4538: mod_base = OTHER; note = N1-methylpseudouracil
  modified_base 4546: mod_base = OTHER; note = N1-methylpseudouracil
  modified_base 4548: mod_base = OTHER; note = N1-methylpseudouracil
  modified_base 4554: mod_base = OTHER; note = N1-methylpseudouracil
  modified_base 4566: mod_base = OTHER; note = N1-methylpseudouracil
  modified_base 4575: mod_base = OTHER; note = N1-methylpseudouracil
  modified_base 4576: mod_base = OTHER; note = N1-methylpseudouracil
  modified_base 4578: mod_base = OTHER; note = N1-methylpseudouracil
  modified_base 4582: mod_base = OTHER; note = N1-methylpseudouracil
  modified_base 4583: mod_base = OTHER; note = N1-methylpseudouracil
  modified_base 4586: mod_base = OTHER; note = N1-methylpseudouracil
  modified_base 4589: mod_base = OTHER; note = N1-methylpseudouracil
  modified_base 4594: mod_base = OTHER; note = N1-methylpseudouracil
  modified_base 4597: mod_base = OTHER; note = N1-methylpseudouracil
  modified_base 4600: mod_base = OTHER; note = N1-methylpseudouracil
  modified_base 4611: mod_base = OTHER; note = N1-methylpseudouracil
  modified_base 4619: mod_base = OTHER; note = N1-methylpseudouracil
  modified_base 4627: mod_base = OTHER; note = N1-methylpseudouracil
  modified_base 4630: mod_base = OTHER; note = N1-methylpseudouracil
  modified_base 4632: mod_base = OTHER; note = N1-methylpseudouracil
  modified_base 4633: mod_base = OTHER; note = N1-methylpseudouracil
  modified_base 4634: mod_base = OTHER; note = N1-methylpseudouracil
  modified_base 4638: mod_base = OTHER; note = N1-methylpseudouracil
  modified_base 4643: mod_base = OTHER; note = N1-methylpseudouracil
  modified_base 4645: mod_base = OTHER; note = N1-methylpseudouracil
  modified_base 4649: mod_base = OTHER; note = N1-methylpseudouracil
ggaggaaatttttttttgatattataagagtttttttttgatattaagaaaatttttttttgatattagaagagtaagaagaaatataagaccccggcgccgccaccatgcaaagaagtccattagagaaagcgtcggttgtgagcaagctgttcttcagctggaccaggcccatcctgcgaaagggctacagacagaggctggagctgtccgacatctaccagattccatccgtggacagcgccgacaatctgagcgagaagctggagagggagtgggaccgcgagctggccagcaagaagaaccctaagctgatcaacgccctgcgccgctgcttcttctggaggttcatgttctacggcatcttcctgtacctgggcgaggtgaccaaggccgtccagcctctgctgctgggccgcatcatcgccagctacgatcccgacaacaaggaggaacgctccatcgccatctacctgggcatcggcctgtgtctgctgttcatcgtgcggaccctgctgctgcaccccgccatcttcggcctgcatcacatcggcatgcagatgaggatcgccatgttctccctgatctacaagaagaccctgaagctgtccagccgcgtgctggataagatcagcatcgggcagctggtgagcctgctgagcaacaacctgaacaagttcgacgaggggttggcgctggcccacttcgtgtggattgccccgctgcaggtggctctgctgatggggctgatctgggagctgctgcaggcctctgccttctgcgggctggggtttctgatcgtgctggccctgttccaagctggcctgggccgcatgatgatgaagtaccgcgatcagagggccggcaagatcagcgagcgcctggtgatcactagcgagatgatagagaacatccagagcgtgaaggcttactgttgggaggaggccatggagaagatgatcgagaacctgaggcagaccgagctgaagctgactagaaaggcagcctacgtgaggtatttcaactccagcgccttcttcttcagcggcttcttcgtggtgttcctgagcgtgctgccctacgccctgatcaagggcatcatcctgaggaagatcttcaccaccattagcttctgcatcgtgctgcgcatggccgtgaccaggcagttcccttgggccgtgcagacttggtacgacagcctgggagccatcaacaagatccaggactttctgcagaagcaggaatataagaccctggagtacaacctgaccaccaccgaggtggtgatggagaacgtgaccgccttctgggaggagggcttcggcgagctgttcgagaaggccaagcagaacaataacaaccgcaagaccagcaacggcgacgactccctcttcttcagcaactttagcctgctgggcacccctgtgctgaaggacatcaacttcaagatcgaaagaggccaactgctggccgtggccggatctaccggcgccggcaagaccagcctgctgatgatgatcatgggcgagctggagcccagcgagggcaagatcaagcacagcggccggatctccttctgctcccagttctcctggatcatgcccggcaccatcaaggagaacatcatcttcggcgtgagctacgacgagtacaggtaccggagcgtgatcaaggcctgccagctggaggaggacatctccaaatttgccgagaaggacaacattgtgctgggcgaaggcgggatcaccctgtccggtggccagcgtgcacgcatctccctggcccgggctgtgtacaaggacgccgacctgtacctgctggacagcccttttggctacctggacgtgctgaccgagaaggagatcttcgagtcctgcgtgtgtaagctgatggccaacaagaccagaatcctggtgaccagcaagatggagcatctgaagaaggccgacaagatcctgatcctgcacgaggggtccagctacttctacggcaccttcagcgagctgcagaacctgcagcccgacttcagctccaagctgatgggctgcgatagcttcgaccagttctccgccgagagaaggaactccattctgaccgagaccctgcaccgattctccctggagggagacgccccagtgagctggaccgagaccaagaagcagagcttcaagcagaccggcgagttcggagagaagcgcaagaactccatcctcaaccccatcaacagcatccggaagttcagcatcgtgcagaagacccctctgcagatgaacgggatcgaggaggacagcgacgagcccctggaacggcgactgtccctcgtgcccgacagcgagcagggcgaggccatcctgccccggatctccgtgatctccactgggcccaccctgcaagcccgacggcggcaaagcgtgctgaacctgatgacccacagcgtgaaccagggccagaatatccaccgcaagactacagccagcacccgcaaggtgagcctggctccccaggccaacctgaccgagctggacatctacagcaggaggctgagccaggagacaggcctggagatcagcgaggagatcaacgaggaggacctgaaggagtgcttcttcgacgacatggagtccatccccgccgtgaccacctggaacacctacctgagatacatcaccgtgcacaagagcctgatcttcgtgctgatctggtgcctggtgatcttcttggccgaggtagccgcctcactggtggtgctgtggctgctgggcaataccccactgcaggacaaggggaactccacccacagccggaacaacagctacgccgtgatcatcacctccaccagcagctactacgtgttctacatctacgtgggcgtggccgacacactgctggccatgggcttcttcagaggcctccctctggtgcacacactgatcaccgtgagcaagatcctgcaccacaagatgctgcacagcgtgctgcaggctcccatgtcaaccctgaacaccctgaaggccggcggcatcctgaacaggttcagcaaggacatcgccattctggacgatctgctgcccctgaccatcttcgacttcatccagctgctgctgatcgtgatcggggccatcgccgtggtggccgtgctgcagccctacatcttcgtggccacagtgcccgtgatcgtggccttcatcatgctgcgcgcctacttcctgcagacctcccagcagctgaagcagctggagagcgaaggccgcagccccatcttcacccacctggtgactagcctgaaggggctgtggaccctgcgcgccttcggcaggcagccctacttcgagaccctgttccacaaggctctgaacctgcacaccgccaactggttcctgtacctcagcaccctgcgctggttccagatgcggatcgagatgatcttcgtgatcttcttcatcgccgtgaccttcatctccatcctgaccaccggggaaggcgagggacgggtgggaatcatcctgaccctggccatgaatatcatgagcaccctgcagtgggccgtgaacagcagcatcgacgtggacagcctgatgcggtccgtgtcccgggtgttcaagttcatcgacatgcccaccgagggcaagcccaccaagagcaccaagccctacaagaacggccagctgagcaaggtgatgattatcgagaacagccacgtgaagaaggacgacatctggccttccggcggccagatgaccgtgaaggacctgaccgccaagtacaccgagggcggcaacgccatcctggagaacatcagcttctccattagccctggacagcgggtgggcctgttgggacggaccggcagtgggaagagcaccctgctgtccgccttcctgcggctgctgaacacggagggcgagatccagatcgacggggtgagctgggacagcatcaccctgcagcagtggcgaaaggccttcggcgtgatcccacagaaggtgtttattttctctggcacctttaggaagaacctggacccctacgagcagtggtccgaccaggagatctggaaggtggccgacgaggtgggcctgcggtcagtgatcgagcagttccccggcaagctggacttcgtgctggtggacggcggctgcgtgctgagccacggccacaagcagctgatgtgcctggcacgcagcgtgctgagcaaggccaagatcctgctgctggacgagccctccgcgcacctggatcccgtgacctaccagatcatcaggcggaccctgaagcaggccttcgccgactgcaccgtgatcctgtgcgagcacagaatcgaggctatgctggagtgccagcagttcctggtgatcgaggagaacaaggtgcggcagtacgactccatccagaagctgctgaacgagcgcagcctgttcagacaggctatctctcccagcgatcgcgtgaagctgttccctcacaggaacagcagcaagtgcaagtctaagccacagatcgccgccctgaaggaggagaccgaggaggaggtgcaggatacccgcctgtaaagctccccgggggcctccaccgcgttatccgttcctcgtaggctggtcctggggaacgggtcggcgggtacccccgtggtctttgaataaagtctgagtgggcggcaaaaaaaaaaaaaaaaaaaaaaaaaaaaaaaaaaaaaaaaaaaaaaaaaaaaaaaaaaaaaaaaaaaaaaaaaaaaaaaaaaaaaaaaaaaaaaaaaaaa

SEQ ID NO: 16 - RNA, 4756 nt, synthetic construct
  source 1..4756: mol_type = other RNA
  modified_base 1: mod_base = OTHER; note = 7-Methylguanosine with triphosphate linkage
  modified_base 2: mod_base = OTHER; note = 2'-O-methyl modified nucleotide
  modified_base 9: mod_base = OTHER; note = N1-methylpseudouracil
  modified_base 10: mod_base = OTHER; note = N1-methylpseudouracil
  modified_base 11: mod_base = OTHER; note = N1-methylpseudouracil
  modified_base 12: mod_base = OTHER; note = N1-methylpseudouracil
  modified_base 13: mod_base = OTHER; note = N1-methylpseudouracil
  modified_base 14: mod_base = OTHER; note = N1-methylpseudouracil
  modified_base 15: mod_base = OTHER; note = N1-methylpseudouracil
  modified_base 16: mod_base = OTHER; note = N1-methylpseudouracil
  modified_base 17: mod_base = OTHER; note = N1-methylpseudouracil
  modified_base 20: mod_base = OTHER; note = N1-methylpseudouracil
  modified_base 22: mod_base = OTHER; note = N1-methylpseudouracil
  modified_base 23: mod_base = OTHER; note = N1-methylpseudouracil
  modified_base 25: mod_base = OTHER; note = N1-methylpseudouracil
  modified_base 31: mod_base = OTHER; note = N1-methylpseudouracil
  modified_base 32: mod_base = OTHER; note = N1-methylpseudouracil
  modified_base 33: mod_base = OTHER; note = N1-methylpseudouracil
  modified_base 34: mod_base = OTHER; note = N1-methylpseudouracil
  modified_base 35: mod_base = OTHER; note = N1-methylpseudouracil
  modified_base 36: mod_base = OTHER; note = N1-methylpseudouracil
  modified_base 37: mod_base = OTHER; note = N1-methylpseudouracil
  modified_base 38: mod_base = OTHER; note = N1-methylpseudouracil
  modified_base 39: mod_base = OTHER; note = N1-methylpseudouracil
  modified_base 42: mod_base = OTHER; note = N1-methylpseudouracil
  modified_base 44: mod_base = OTHER; note = N1-methylpseudouracil
  modified_base 45: mod_base = OTHER; note = N1-methylpseudouracil
  modified_base 53: mod_base = OTHER; note = N1-methylpseudouracil
  modified_base 54: mod_base = OTHER; note = N1-methylpseudouracil
  modified_base 55: mod_base = OTHER; note = N1-methylpseudouracil
  modified_base 56: mod_base = OTHER; note = N1-methylpseudouracil
  modified_base 57: mod_base = OTHER; note = N1-methylpseudouracil
  modified_base 58: mod_base = OTHER; note = N1-methylpseudouracil
  modified_base 59: mod_base = OTHER; note = N1-methylpseudouracil
  modified_base 60: mod_base = OTHER; note = N1-methylpseudouracil
  modified_base 61: mod_base = OTHER; note = N1-methylpseudouracil
  modified_base 64: mod_base = OTHER; note = N1-methylpseudouracil
  modified_base 66: mod_base = OTHER; note = N1-methylpseudouracil
  modified_base 67: mod_base = OTHER; note = N1-methylpseudouracil
  modified_base 75: mod_base = OTHER; note = N1-methylpseudouracil
  modified_base 85: mod_base = OTHER; note = N1-methylpseudouracil
  modified_base 87: mod_base = OTHER; note = N1-methylpseudouracil
  modified_base 109: mod_base = OTHER; note = N1-methylpseudouracil
  modified_base 124: mod_base = OTHER; note = N1-methylpseudouracil
  modified_base 139: mod_base = OTHER; note = N1-methylpseudouracil
  modified_base 142: mod_base = OTHER; note = N1-methylpseudouracil
  modified_base 144: mod_base = OTHER; note = N1-methylpseudouracil
  modified_base 151: mod_base = OTHER; note = N1-methylpseudouracil
  modified_base 153: mod_base = OTHER; note = N1-methylpseudouracil
  modified_base 154: mod_base = OTHER; note = N1-methylpseudouracil
  modified_base 156: mod_base = OTHER; note = N1-methylpseudouracil
  modified_base 157: mod_base = OTHER; note = N1-methylpseudouracil
  modified_base 159: mod_base = OTHER; note = N1-methylpseudouracil
  modified_base 162: mod_base = OTHER; note = N1-methylpseudouracil
  modified_base 175: mod_base = OTHER; note = N1-methylpseudouracil
  modified_base 178: mod_base = OTHER; note = N1-methylpseudouracil
  modified_base 189: mod_base = OTHER; note = N1-methylpseudouracil
  modified_base 202: mod_base = OTHER; note = N1-methylpseudouracil
  modified_base 208: mod_base = OTHER; note = N1-methylpseudouracil
  modified_base 217: mod_base = OTHER; note = N1-methylpseudouracil
  modified_base 219: mod_base = OTHER; note = N1-methylpseudouracil
  modified_base 226: mod_base = OTHER; note = N1-methylpseudouracil
  modified_base 235: mod_base = OTHER; note = N1-methylpseudouracil
  modified_base 240: mod_base = OTHER; note = N1-methylpseudouracil
  modified_base 253: mod_base = OTHER; note = N1-methylpseudouracil
  modified_base 265: mod_base = OTHER; note = N1-methylpseudouracil
  modified_base 276: mod_base = OTHER; note = N1-methylpseudouracil
  modified_base 289: mod_base = OTHER; note = N1-methylpseudouracil
  modified_base 294: mod_base = OTHER; note = N1-methylpseudouracil
  modified_base 313: mod_base = OTHER; note = N1-methylpseudouracil
  modified_base 316: mod_base = OTHER; note = N1-methylpseudouracil
  modified_base 325: mod_base = OTHER; note = N1-methylpseudouracil
  modified_base 333: mod_base = OTHER; note = N1-methylpseudouracil
  modified_base 336: mod_base = OTHER; note = N1-methylpseudouracil
  modified_base 337: mod_base = OTHER; note = N1-methylpseudouracil
  modified_base 339: mod_base = OTHER; note = N1-methylpseudouracil
  modified_base 340: mod_base = OTHER; note = N1-methylpseudouracil
  modified_base 342: mod_base = OTHER; note = N1-methylpseudouracil
  modified_base 348: mod_base = OTHER; note = N1-methylpseudouracil
  modified_base 349: mod_base = OTHER; note = N1-methylpseudouracil
  modified_base 352: mod_base = OTHER; note = N1-methylpseudouracil
  modified_base 354: mod_base = OTHER; note = N1-methylpseudouracil
  modified_base 355: mod_base = OTHER; note = N1-methylpseudouracil
  modified_base 357: mod_base = OTHER; note = N1-methylpseudouracil
  modified_base 364: mod_base = OTHER; note = N1-methylpseudouracil
  modified_base 366: mod_base = OTHER; note = N1-methylpseudouracil
  modified_base 367: mod_base = OTHER; note = N1-methylpseudouracil
  modified_base 370: mod_base = OTHER; note = N1-methylpseudouracil
  modified_base 372: mod_base = OTHER; note = N1-methylpseudouracil
  modified_base 376: mod_base = OTHER; note = N1-methylpseudouracil
  modified_base 385: mod_base = OTHER; note = N1-methylpseudouracil
  modified_base 397: mod_base = OTHER; note = N1-methylpseudouracil
  modified_base 406: mod_base = OTHER; note = N1-methylpseudouracil
  modified_base 409: mod_base = OTHER; note = N1-methylpseudouracil
  modified_base 411: mod_base = OTHER; note = N1-methylpseudouracil
  modified_base 412: mod_base = OTHER; note = N1-methylpseudouracil
  modified_base 421: mod_base = OTHER; note = N1-methylpseudouracil
  modified_base 424: mod_base = OTHER; note = N1-methylpseudouracil
  modified_base 432: mod_base = OTHER; note = N1-methylpseudouracil
  modified_base 463: mod_base = OTHER; note = N1-methylpseudouracil
  modified_base 469: mod_base = OTHER; note = N1-methylpseudouracil
  modified_base 471: mod_base = OTHER; note = N1-methylpseudouracil
  modified_base 475: mod_base = OTHER; note = N1-methylpseudouracil
  modified_base 481: mod_base = OTHER; note = N1-methylpseudouracil
  modified_base 487: mod_base = OTHER; note = N1-methylpseudouracil
  modified_base 489: mod_base = OTHER; note = N1-methylpseudouracil
  modified_base 493: mod_base = OTHER; note = N1-methylpseudouracil
  modified_base 496: mod_base = OTHER; note = N1-methylpseudouracil
  modified_base 498: mod_base = OTHER; note = N1-methylpseudouracil
  modified_base 499: mod_base = OTHER; note = N1-methylpseudouracil
  modified_base 502: mod_base = OTHER; note = N1-methylpseudouracil
  modified_base 505: mod_base = OTHER; note = N1-methylpseudouracil
  modified_base 514: mod_base = OTHER; note = N1-methylpseudouracil
  modified_base 517: mod_base = OTHER; note = N1-methylpseudouracil
  modified_base 520: mod_base = OTHER; note = N1-methylpseudouracil
  modified_base 532: mod_base = OTHER; note = N1-methylpseudouracil
  modified_base 534: mod_base = OTHER; note = N1-methylpseudouracil
  modified_base 535: mod_base = OTHER; note = N1-methylpseudouracil
  modified_base 541: mod_base = OTHER; note = N1-methylpseudouracil
  modified_base 550: mod_base = OTHER; note = N1-methylpseudouracil
  modified_base 556: mod_base = OTHER; note = N1-methylpseudouracil
  modified_base 562: mod_base = OTHER; note = N1-methylpseudouracil
  modified_base 568: mod_base = OTHER; note = N1-methylpseudouracil
  modified_base 574: mod_base = OTHER; note = N1-methylpseudouracil
  modified_base 576: mod_base = OTHER; note = N1-methylpseudouracil
  modified_base 577: mod_base = OTHER; note = N1-methylpseudouracil
  modified_base 583: mod_base = OTHER; note = N1-methylpseudouracil
  modified_base 586: mod_base = OTHER; note = N1-methylpseudouracil
  modified_base 588: mod_base = OTHER; note = N1-methylpseudouracil
  modified_base 601: mod_base = OTHER; note = N1-methylpseudouracil
  modified_base 607: mod_base = OTHER; note = N1-methylpseudouracil
  modified_base 609: mod_base = OTHER; note = N1-methylpseudouracil
  modified_base 619: mod_base = OTHER; note = N1-methylpseudouracil
  modified_base 622: mod_base = OTHER; note = N1-methylpseudouracil
  modified_base 631: mod_base = OTHER; note = N1-methylpseudouracil
  modified_base 637: mod_base = OTHER; note = N1-methylpseudouracil
  modified_base 646: mod_base = OTHER; note = N1-methylpseudouracil
  modified_base 649: mod_base = OTHER; note = N1-methylpseudouracil
  modified_base 655: mod_base = OTHER; note = N1-methylpseudouracil
  modified_base 658: mod_base = OTHER; note = N1-methylpseudouracil
  modified_base 660: mod_base = OTHER; note = N1-methylpseudouracil
  modified_base 670: mod_base = OTHER; note = N1-methylpseudouracil
  modified_base 678: mod_base = OTHER; note = N1-methylpseudouracil
  modified_base 679: mod_base = OTHER; note = N1-methylpseudouracil
  modified_base 691: mod_base = OTHER; note = N1-methylpseudouracil
  modified_base 697: mod_base = OTHER; note = N1-methylpseudouracil
  modified_base 705: mod_base = OTHER; note = N1-methylpseudouracil
  modified_base 706: mod_base = OTHER; note = N1-methylpseudouracil
  modified_base 709: mod_base = OTHER; note = N1-methylpseudouracil
  modified_base 711: mod_base = OTHER; note = N1-methylpseudouracil
  modified_base 715: mod_base = OTHER; note = N1-methylpseudouracil
  modified_base 722: mod_base = OTHER; note = N1-methylpseudouracil
  modified_base 724: mod_base = OTHER; note = N1-methylpseudouracil
  modified_base 730: mod_base = OTHER; note = N1-methylpseudouracil
  modified_base 736: mod_base = OTHER; note = N1-methylpseudouracil
  modified_base 739: mod_base = OTHER; note = N1-methylpseudouracil
  modified_base 742: mod_base = OTHER; note = N1-methylpseudouracil
  modified_base 748: mod_base = OTHER; note = N1-methylpseudouracil
  modified_base 751: mod_base = OTHER; note = N1-methylpseudouracil
  modified_base 753: mod_base = OTHER; note = N1-methylpseudouracil
  modified_base 760: mod_base = OTHER; note = N1-methylpseudouracil
  modified_base 763: mod_base = OTHER; note = N1-methylpseudouracil
  modified_base 771: mod_base = OTHER; note = N1-methylpseudouracil
  modified_base 777: mod_base = OTHER; note = N1-methylpseudouracil
  modified_base 778: mod_base = OTHER; note = N1-methylpseudouracil
  modified_base 780: mod_base = OTHER; note = N1-methylpseudouracil
  modified_base 787: mod_base = OTHER; note = N1-methylpseudouracil
  modified_base 792: mod_base = OTHER; note = N1-methylpseudouracil
  modified_base 793: mod_base = OTHER; note = N1-methylpseudouracil
  modified_base 796: mod_base = OTHER; note = N1-methylpseudouracil
  modified_base 799: mod_base = OTHER; note = N1-methylpseudouracil
  modified_base 802: mod_base = OTHER; note = N1-methylpseudouracil
  modified_base 805: mod_base = OTHER; note = N1-methylpseudouracil
  modified_base 811: mod_base = OTHER; note = N1-methylpseudouracil
  modified_base 813: mod_base = OTHER; note = N1-methylpseudouracil
  modified_base 814: mod_base = OTHER; note = N1-methylpseudouracil
  modified_base 815: mod_base = OTHER; note = N1-methylpseudouracil
  modified_base 826: mod_base = OTHER; note = N1-methylpseudouracil
  modified_base 835: mod_base = OTHER; note = N1-methylpseudouracil
  modified_base 838: mod_base = OTHER; note = N1-methylpseudouracil
  modified_base 841: mod_base = OTHER; note = N1-methylpseudouracil
  modified_base 846: mod_base = OTHER; note = N1-methylpseudouracil
  modified_base 848: mod_base = OTHER; note = N1-methylpseudouracil
  modified_base 863: mod_base = OTHER; note = N1-methylpseudouracil
  modified_base 871: mod_base = OTHER; note = N1-methylpseudouracil
  modified_base 873: mod_base = OTHER; note = N1-methylpseudouracil
  modified_base 883: mod_base = OTHER; note = N1-methylpseudouracil
  modified_base 886: mod_base = OTHER; note = N1-methylpseudouracil
  modified_base 889: mod_base = OTHER; note = N1-methylpseudouracil
  modified_base 901: mod_base = OTHER; note = N1-methylpseudouracil
  modified_base 904: mod_base = OTHER; note = N1-methylpseudouracil
  modified_base 913: mod_base = OTHER; note = N1-methylpseudouracil
  modified_base 918: mod_base = OTHER; note = N1-methylpseudouracil
  modified_base 922: mod_base = OTHER; note = N1-methylpseudouracil
  modified_base 930: mod_base = OTHER; note = N1-methylpseudouracil
  modified_base 933: mod_base = OTHER; note = N1-methylpseudouracil
  modified_base 936: mod_base = OTHER; note = N1-methylpseudouracil
  modified_base 949: mod_base = OTHER; note = N1-methylpseudouracil
  modified_base 958: mod_base = OTHER; note = N1-methylpseudouracil
  modified_base 961: mod_base = OTHER; note = N1-methylpseudouracil
  modified_base 968: mod_base = OTHER; note = N1-methylpseudouracil
  modified_base 970: mod_base = OTHER; note = N1-methylpseudouracil
  modified_base 985: mod_base = OTHER; note = N1-methylpseudouracil
  modified_base 991: mod_base = OTHER; note = N1-methylpseudouracil
  modified_base 1008: mod_base = OTHER; note = N1-methylpseudouracil
  modified_base 1012: mod_base = OTHER; note = N1-methylpseudouracil
  modified_base 1017: mod_base = OTHER; note = N1-methylpseudouracil
  modified_base 1020: mod_base = OTHER; note = N1-methylpseudouracil
  modified_base 1021: mod_base = OTHER; note = N1-methylpseudouracil
  modified_base 1029: mod_base = OTHER; note = N1-methylpseudouracil
  modified_base 1035: mod_base = OTHER; note = N1-methylpseudouracil
  modified_base 1036: mod_base = OTHER; note = N1-methylpseudouracil
  modified_base 1038: mod_base = OTHER; note = N1-methylpseudouracil
  modified_base 1039: mod_base = OTHER; note = N1-methylpseudouracil
  modified_base 1041: mod_base = OTHER; note = N1-methylpseudouracil
  modified_base 1042: mod_base = OTHER; note = N1-methylpseudouracil
  modified_base 1050: mod_base = OTHER; note = N1-methylpseudouracil
  modified_base 1051: mod_base = OTHER; note = N1-methylpseudouracil
  modified_base 1053: mod_base = OTHER; note = N1-methylpseudouracil
  modified_base 1054: mod_base = OTHER; note = N1-methylpseudouracil
  modified_base 1057: mod_base = OTHER; note = N1-methylpseudouracil
  modified_base 1060: mod_base = OTHER; note = N1-methylpseudouracil
  modified_base 1062: mod_base = OTHER; note = N1-methylpseudouracil
  modified_base 1063: mod_base = OTHER; note = N1-methylpseudouracil
  modified_base 1066: mod_base = OTHER; note = N1-methylpseudouracil
  modified_base 1068: mod_base = OTHER; note = N1-methylpseudouracil
  modified_base 1072: mod_base = OTHER; note = N1-methylpseudouracil
  modified_base 1075: mod_base = OTHER; note = N1-methylpseudouracil
  modified_base 1079: mod_base = OTHER; note = N1-methylpseudouracil
  modified_base 1080: mod_base = OTHER; note = N1-methylpseudouracil
  modified_base 1087: mod_base = OTHER; note = N1-methylpseudouracil
  modified_base 1090: mod_base = OTHER; note = N1-methylpseudouracil
  modified_base 1099: mod_base = OTHER; note = N1-methylpseudouracil
  modified_base 1102: mod_base = OTHER; note = N1-methylpseudouracil
  modified_base 1105: mod_base = OTHER; note = N1-methylpseudouracil
  modified_base 1114: mod_base = OTHER; note = N1-methylpseudouracil
  modified_base 1116: mod_base = OTHER; note = N1-methylpseudouracil
  modified_base 1117: mod_base = OTHER; note = N1-methylpseudouracil
  modified_base 1126: mod_base = OTHER; note = N1-methylpseudouracil
  modified_base 1131: mod_base = OTHER; note = N1-methylpseudouracil
  modified_base 1132: mod_base = OTHER; note = N1-methylpseudouracil
  modified_base 1134: mod_base = OTHER; note = N1-methylpseudouracil
  modified_base 1138: mod_base = OTHER; note = N1-methylpseudouracil
  modified_base 1141: mod_base = OTHER; note = N1-methylpseudouracil
  modified_base 1144: mod_base = OTHER; note = N1-methylpseudouracil
  modified_base 1150: mod_base = OTHER; note = N1-methylpseudouracil
  modified_base 1156: mod_base = OTHER; note = N1-methylpseudouracil
  modified_base 1167: mod_base = OTHER; note = N1-methylpseudouracil
  modified_base 1168: mod_base = OTHER; note = N1-methylpseudouracil
  modified_base 1173: mod_base = OTHER; note = N1-methylpseudouracil
  modified_base 1180: mod_base = OTHER; note = N1-methylpseudouracil
  modified_base 1188: mod_base = OTHER; note = N1-methylpseudouracil
  modified_base 1191: mod_base = OTHER; note = N1-methylpseudouracil
  modified_base 1201: mod_base = OTHER; note = N1-methylpseudouracil
  modified_base 1210: mod_base = OTHER; note = N1-methylpseudouracil
  modified_base 1219: mod_base = OTHER; note = N1-methylpseudouracil
  modified_base 1227: mod_base = OTHER; note = N1-methylpseudouracil
  modified_base 1228: mod_base = OTHER; note = N1-methylpseudouracil
  modified_base 1231: mod_base = OTHER; note = N1-methylpseudouracil
  modified_base 1245: mod_base = OTHER; note = N1-methylpseudouracil
  modified_base 1255: mod_base = OTHER; note = N1-methylpseudouracil
  modified_base 1260: mod_base = OTHER; note = N1-methylpseudouracil
  modified_base 1267: mod_base = OTHER; note = N1-methylpseudouracil
  modified_base 1282: mod_base = OTHER; note = N1-methylpseudouracil
  modified_base 1285: mod_base = OTHER; note = N1-methylpseudouracil
  modified_base 1288: mod_base = OTHER; note = N1-methylpseudouracil
  modified_base 1297: mod_base = OTHER; note = N1-methylpseudouracil
  modified_base 1305: mod_base = OTHER; note = N1-methylpseudouracil
  modified_base 1306: mod_base = OTHER; note = N1-methylpseudouracil
  modified_base 1308: mod_base = OTHER; note = N1-methylpseudouracil
  modified_base 1320: mod_base = OTHER; note = N1-methylpseudouracil
  modified_base 1321: mod_base = OTHER; note = N1-methylpseudouracil
  modified_base 1330: mod_base = OTHER; note = N1-methylpseudouracil
  modified_base 1332: mod_base = OTHER; note = N1-methylpseudouracil
  modified_base 1333: mod_base = OTHER; note = N1-methylpseudouracil
  modified_base 1390: mod_base = OTHER; note = N1-methylpseudouracil
  modified_base 1392: mod_base = OTHER; note = N1-methylpseudouracil
  modified_base 1393: mod_base = OTHER; note = N1-methylpseudouracil
  modified_base 1395: mod_base = OTHER; note = N1-methylpseudouracil
  modified_base 1396: mod_base = OTHER; note = N1-methylpseudouracil
  modified_base 1398: mod_base = OTHER; note = N1-methylpseudouracil
  modified_base 1404: mod_base = OTHER; note = N1-methylpseudouracil
  modified_base 1405: mod_base = OTHER; note = N1-methylpseudouracil
  modified_base 1411: mod_base = OTHER; note = N1-methylpseudouracil
  modified_base 1414: mod_base = OTHER; note = N1-methylpseudouracil
  modified_base 1426: mod_base = OTHER; note = N1-methylpseudouracil
  modified_base 1429: mod_base = OTHER; note = N1-methylpseudouracil
  modified_base 1438: mod_base = OTHER; note = N1-methylpseudouracil
  modified_base 1443: mod_base = OTHER; note = N1-methylpseudouracil
  modified_base 1444: mod_base = OTHER; note = N1-methylpseudouracil
  modified_base 1450: mod_base = OTHER; note = N1-methylpseudouracil
  modified_base 1464: mod_base = OTHER; note = N1-methylpseudouracil
  modified_base 1465: mod_base = OTHER; note = N1-methylpseudouracil
  modified_base 1468: mod_base = OTHER; note = N1-methylpseudouracil
  modified_base 1472: mod_base = OTHER; note = N1-methylpseudouracil
  modified_base 1474: mod_base = OTHER; note = N1-methylpseudouracil
  modified_base 1482: mod_base = OTHER; note = N1-methylpseudouracil
  modified_base 1502: mod_base = OTHER; note = N1-methylpseudouracil
  modified_base 1507: mod_base = OTHER; note = N1-methylpseudouracil
  modified_base 1510: mod_base = OTHER; note = N1-methylpseudouracil
  modified_base 1513: mod_base = OTHER; note = N1-methylpseudouracil
  modified_base 1516: mod_base = OTHER; note = N1-methylpseudouracil
  modified_base 1519: mod_base = OTHER; note = N1-methylpseudouracil
  modified_base 1522: mod_base = OTHER; note = N1-methylpseudouracil
  modified_base 1531: mod_base = OTHER; note = N1-methylpseudouracil
  modified_base 1539: mod_base = OTHER; note = N1-methylpseudouracil
  modified_base 1552: mod_base = OTHER; note = N1-methylpseudouracil
  modified_base 1560: mod_base = OTHER; note = N1-methylpseudouracil
  modified_base 1570: mod_base = OTHER; note = N1-methylpseudouracil
  modified_base 1575: mod_base = OTHER; note = N1-methylpseudouracil
  modified_base 1576: mod_base = OTHER; note = N1-methylpseudouracil
  modified_base 1578: mod_base = OTHER; note = N1-methylpseudouracil
  modified_base 1587: mod_base = OTHER; note = N1-methylpseudouracil
  modified_base 1588: mod_base = OTHER; note = N1-methylpseudouracil
  modified_base 1590: mod_base = OTHER; note = N1-methylpseudouracil
  modified_base 1592: mod_base = OTHER; note = N1-methylpseudouracil
  modified_base 1593: mod_base = OTHER; note = N1-methylpseudouracil
  modified_base 1597: mod_base = OTHER; note = N1-methylpseudouracil
  modified_base 1600: mod_base = OTHER; note = N1-methylpseudouracil
  modified_base 1612: mod_base = OTHER; note = N1-methylpseudouracil
  modified_base 1624: mod_base = OTHER; note = N1-methylpseudouracil
  modified_base 1627: mod_base = OTHER; note = N1-methylpseudouracil
  modified_base 1629: mod_base = OTHER; note = N1-methylpseudouracil
  modified_base 1630: mod_base = OTHER; note = N1-methylpseudouracil
  modified_base 1636: mod_base = OTHER; note = N1-methylpseudouracil
  modified_base 1638: mod_base = OTHER; note = N1-methylpseudouracil
  modified_base 1641: mod_base = OTHER; note = N1-methylpseudouracil
  modified_base 1650: mod_base = OTHER; note = N1-methylpseudouracil
  modified_base 1656: mod_base = OTHER; note = N1-methylpseudouracil
  modified_base 1666: mod_base = OTHER; note = N1-methylpseudouracil
  modified_base 1669: mod_base = OTHER; note = N1-methylpseudouracil
  modified_base 1677: mod_base = OTHER; note = N1-methylpseudouracil
  modified_base 1684: mod_base = OTHER; note = N1-methylpseudouracil
  modified_base 1696: mod_base = OTHER; note = N1-methylpseudouracil
  modified_base 1704: mod_base = OTHER; note = N1-methylpseudouracil
  modified_base 1705: mod_base = OTHER; note = N1-methylpseudouracil
  modified_base 1723: mod_base = OTHER; note = N1-methylpseudouracil
  modified_base 1726: mod_base = OTHER; note = N1-methylpseudouracil
  modified_base 1729: mod_base = OTHER; note = N1-methylpseudouracil
  modified_base 1744: mod_base = OTHER; note = N1-methylpseudouracil
  modified_base 1750: mod_base = OTHER; note = N1-methylpseudouracil
  modified_base 1774: mod_base = OTHER; note = N1-methylpseudouracil
  modified_base 1780: mod_base = OTHER; note = N1-methylpseudouracil
  modified_base 1792: mod_base = OTHER; note = N1-methylpseudouracil
  modified_base 1794: mod_base = OTHER; note = N1-methylpseudouracil
  modified_base 1805: mod_base = OTHER; note = N1-methylpseudouracil
  modified_base 1810: mod_base = OTHER; note = N1-methylpseudouracil
  modified_base 1812: mod_base = OTHER; note = N1-methylpseudouracil
  modified_base 1816: mod_base = OTHER; note = N1-methylpseudouracil
  modified_base 1819: mod_base = OTHER; note = N1-methylpseudouracil
  modified_base 1830: mod_base = OTHER; note = N1-methylpseudouracil
  modified_base 1831: mod_base = OTHER; note = N1-methylpseudouracil
  modified_base 1836: mod_base = OTHER; note = N1-methylpseudouracil
  modified_base 1840: mod_base = OTHER; note = N1-methylpseudouracil
  modified_base 1846: mod_base = OTHER; note = N1-methylpseudouracil
  modified_base 1849: mod_base = OTHER; note = N1-methylpseudouracil
  modified_base 1864: mod_base = OTHER; note = N1-methylpseudouracil
  modified_base 1866: mod_base = OTHER; note = N1-methylpseudouracil
  modified_base 1867: mod_base = OTHER; note = N1-methylpseudouracil
  modified_base 1872: mod_base = OTHER; note = N1-methylpseudouracil
  modified_base 1875: mod_base = OTHER; note = N1-methylpseudouracil
  modified_base 1879: mod_base = OTHER; note = N1-methylpseudouracil
  modified_base 1881: mod_base = OTHER; note = N1-methylpseudouracil
  modified_base 1888: mod_base = OTHER; note = N1-methylpseudouracil
  modified_base 1891: mod_base = OTHER; note = N1-methylpseudouracil
  modified_base 1909: mod_base = OTHER; note = N1-methylpseudouracil
  modified_base 1912: mod_base = OTHER; note = N1-methylpseudouracil
  modified_base 1915: mod_base = OTHER; note = N1-methylpseudouracil
  modified_base 1927: mod_base = OTHER; note = N1-methylpseudouracil
  modified_base 1936: mod_base = OTHER; note = N1-methylpseudouracil
  modified_base 1954: mod_base = OTHER; note = N1-methylpseudouracil
  modified_base 1957: mod_base = OTHER; note = N1-methylpseudouracil
  modified_base 1960: mod_base = OTHER; note = N1-methylpseudouracil
  modified_base 1963: mod_base = OTHER; note = N1-methylpseudouracil
  modified_base 1974: mod_base = OTHER; note = N1-methylpseudouracil
  modified_base 1980: mod_base = OTHER; note = N1-methylpseudouracil
  modified_base 1983: mod_base = OTHER; note = N1-methylpseudouracil
  modified_base 1984: mod_base = OTHER; note = N1-methylpseudouracil
  modified_base 1986: mod_base = OTHER; note = N1-methylpseudouracil
  modified_base 1995: mod_base = OTHER; note = N1-methylpseudouracil
  modified_base 1996: mod_base = OTHER; note = N1-methylpseudouracil
  modified_base 2005: mod_base = OTHER; note = N1-methylpseudouracil
  modified_base 2014: mod_base = OTHER; note = N1-methylpseudouracil
  modified_base 2025: mod_base = OTHER; note = N1-methylpseudouracil
  modified_base 2026: mod_base = OTHER; note = N1-methylpseudouracil
  modified_base 2038: mod_base = OTHER; note = N1-methylpseudouracil
  modified_base 2039: mod_base = OTHER; note = N1-methylpseudouracil
  modified_base 2041: mod_base = OTHER; note = N1-methylpseudouracil
  modified_base 2046: mod_base = OTHER; note = N1-methylpseudouracil
  modified_base 2055: mod_base = OTHER; note = N1-methylpseudouracil
  modified_base 2056: mod_base = OTHER; note = N1-methylpseudouracil
  modified_base 2064: mod_base = OTHER; note = N1-methylpseudouracil
  modified_base 2065: mod_base = OTHER; note = N1-methylpseudouracil
  modified_base 2067: mod_base = OTHER; note = N1-methylpseudouracil
  modified_base 2072: mod_base = OTHER; note = N1-methylpseudouracil
  modified_base 2084: mod_base = OTHER; note = N1-methylpseudouracil
  modified_base 2085: mod_base = OTHER; note = N1-methylpseudouracil
  modified_base 2089: mod_base = OTHER; note = N1-methylpseudouracil
  modified_base 2092: mod_base = OTHER; note = N1-methylpseudouracil
  modified_base 2104: mod_base = OTHER; note = N1-methylpseudouracil
  modified_base 2112: mod_base = OTHER; note = N1-methylpseudouracil
  modified_base 2113: mod_base = OTHER; note = N1-methylpseudouracil
  modified_base 2115: mod_base = OTHER; note = N1-methylpseudouracil
  modified_base 2119: mod_base = OTHER; note = N1-methylpseudouracil
  modified_base 2132: mod_base = OTHER; note = N1-methylpseudouracil
  modified_base 2137: mod_base = OTHER; note = N1-methylpseudouracil
  modified_base 2142: mod_base = OTHER; note = N1-methylpseudouracil
  modified_base 2163: mod_base = OTHER; note = N1-methylpseudouracil
  modified_base 2166: mod_base = OTHER; note = N1-methylpseudouracil
  modified_base 2167: mod_base = OTHER; note = N1-methylpseudouracil
  modified_base 2184: mod_base = OTHER; note = N1-methylpseudouracil
  modified_base 2185: mod_base = OTHER; note = N1-methylpseudouracil
  modified_base 2209: mod_base = OTHER; note = N1-methylpseudouracil
  modified_base 2212: mod_base = OTHER; note = N1-methylpseudouracil
  modified_base 2221: mod_base = OTHER; note = N1-methylpseudouracil
  modified_base 2230: mod_base = OTHER; note = N1-methylpseudouracil
  modified_base 2238: mod_base = OTHER; note = N1-methylpseudouracil
  modified_base 2239: mod_base = OTHER; note = N1-methylpseudouracil
  modified_base 2241: mod_base = OTHER; note = N1-methylpseudouracil
  modified_base 2245: mod_base = OTHER; note = N1-methylpseudouracil
  modified_base 2248: mod_base = OTHER; note = N1-methylpseudouracil
  modified_base 2263: mod_base = OTHER; note = N1-methylpseudouracil
  modified_base 2269: mod_base = OTHER; note = N1-methylpseudouracil
  modified_base 2278: mod_base = OTHER; note = N1-methylpseudouracil
  modified_base 2301: mod_base = OTHER; note = N1-methylpseudouracil
  modified_base 2302: mod_base = OTHER; note = N1-methylpseudouracil
  modified_base 2314: mod_base = OTHER; note = N1-methylpseudouracil
  modified_base 2320: mod_base = OTHER; note = N1-methylpseudouracil
  modified_base 2323: mod_base = OTHER; note = N1-methylpseudouracil
  modified_base 2350: mod_base = OTHER; note = N1-methylpseudouracil
  modified_base 2353: mod_base = OTHER; note = N1-methylpseudouracil
  modified_base 2362: mod_base = OTHER; note = N1-methylpseudouracil
  modified_base 2364: mod_base = OTHER; note = N1-methylpseudouracil
  modified_base 2368: mod_base = OTHER; note = N1-methylpseudouracil
  modified_base 2371: mod_base = OTHER; note = N1-methylpseudouracil
  modified_base 2389: mod_base = OTHER; note = N1-methylpseudouracil
  modified_base 2409: mod_base = OTHER; note = N1-methylpseudouracil
  modified_base 2413: mod_base = OTHER; note = N1-methylpseudouracil
  modified_base 2416: mod_base = OTHER; note = N1-methylpseudouracil
  modified_base 2422: mod_base = OTHER; note = N1-methylpseudouracil
  modified_base 2425: mod_base = OTHER; note = N1-methylpseudouracil
  modified_base 2433: mod_base = OTHER; note = N1-methylpseudouracil
  modified_base 2437: mod_base = OTHER; note = N1-methylpseudouracil
  modified_base 2455: mod_base = OTHER; note = N1-methylpseudouracil
  modified_base 2459: mod_base = OTHER; note = N1-methylpseudouracil
  modified_base 2475: mod_base = OTHER; note = N1-methylpseudouracil
  modified_base 2488: mod_base = OTHER; note = N1-methylpseudouracil
  modified_base 2494: mod_base = OTHER; note = N1-methylpseudouracil
  modified_base 2512: mod_base = OTHER; note = N1-methylpseudouracil
  modified_base 2521: mod_base = OTHER; note = N1-methylpseudouracil
  modified_base 2525: mod_base = OTHER; note = N1-methylpseudouracil
  modified_base 2527: mod_base = OTHER; note = N1-methylpseudouracil
  modified_base 2529: mod_base = OTHER; note = N1-methylpseudouracil
  modified_base 2532: mod_base = OTHER; note = N1-methylpseudouracil
  modified_base 2542: mod_base = OTHER; note = N1-methylpseudouracil
  modified_base 2560: mod_base = OTHER; note = N1-methylpseudouracil
  modified_base 2566: mod_base = OTHER; note = N1-methylpseudouracil
  modified_base 2578: mod_base = OTHER; note = N1-methylpseudouracil
  modified_base 2593: mod_base = OTHER; note = N1-methylpseudouracil
  modified_base 2601: mod_base = OTHER; note = N1-methylpseudouracil
  modified_base 2604: mod_base = OTHER; note = N1-methylpseudouracil
  modified_base 2605: mod_base = OTHER; note = N1-methylpseudouracil
  modified_base 2607: mod_base = OTHER; note = N1-methylpseudouracil
  modified_base 2608: mod_base = OTHER; note = N1-methylpseudouracil
  modified_base 2617: mod_base = OTHER; note = N1-methylpseudouracil
  modified_base 2622: mod_base = OTHER; note = N1-methylpseudouracil
  modified_base 2626: mod_base = OTHER; note = N1-methylpseudouracil
  modified_base 2635: mod_base = OTHER; note = N1-methylpseudouracil
  modified_base 2643: mod_base = OTHER; note = N1-methylpseudouracil
  modified_base 2652: mod_base = OTHER; note = N1-methylpseudouracil
  modified_base 2656: mod_base = OTHER; note = N1-methylpseudouracil
  modified_base 2661: mod_base = OTHER; note = N1-methylpseudouracil
  modified_base 2665: mod_base = OTHER; note = N1-methylpseudouracil
  modified_base 2671: mod_base = OTHER; note = N1-methylpseudouracil
  modified_base 2679: mod_base = OTHER; note = N1-methylpseudouracil
  modified_base 2683: mod_base = OTHER; note = N1-methylpseudouracil
  modified_base 2686: mod_base = OTHER; note = N1-methylpseudouracil
  modified_base 2688: mod_base = OTHER; note = N1-methylpseudouracil
  modified_base 2689: mod_base = OTHER; note = N1-methylpseudouracil
  modified_base 2692: mod_base = OTHER; note = N1-methylpseudouracil
  modified_base 2695: mod_base = OTHER; note = N1-methylpseudouracil
  modified_base 2698: mod_base = OTHER; note = N1-methylpseudouracil
  modified_base 2700: mod_base = OTHER; note = N1-methylpseudouracil
  modified_base 2703: mod_base = OTHER; note = N1-methylpseudouracil
  modified_base 2707: mod_base = OTHER; note = N1-methylpseudouracil
  modified_base 2710: mod_base = OTHER; note = N1-methylpseudouracil
  modified_base 2713: mod_base = OTHER; note = N1-methylpseudouracil
  modified_base 2715: mod_base = OTHER; note = N1-methylpseudouracil
  modified_base 2716: mod_base = OTHER; note = N1-methylpseudouracil
  modified_base 2719: mod_base = OTHER; note = N1-methylpseudouracil
  modified_base 2720: mod_base = OTHER; note = N1-methylpseudouracil
  modified_base 2728: mod_base = OTHER; note = N1-methylpseudouracil
  modified_base 2740: mod_base = OTHER; note = N1-methylpseudouracil
  modified_base 2743: mod_base = OTHER; note = N1-methylpseudouracil
  modified_base 2746: mod_base = OTHER; note = N1-methylpseudouracil
  modified_base 2749: mod_base = OTHER; note = N1-methylpseudouracil
  modified_base 2751: mod_base = OTHER; note = N1-methylpseudouracil
  modified_base 2755: mod_base = OTHER; note = N1-methylpseudouracil
  modified_base 2758: mod_base = OTHER; note = N1-methylpseudouracil
  modified_base 2771: mod_base = OTHER; note = N1-methylpseudouracil
  modified_base 2773: mod_base = OTHER; note = N1-methylpseudouracil
  modified_base 2780: mod_base = OTHER; note = N1-methylpseudouracil
  modified_base 2814: mod_base = OTHER; note = N1-methylpseudouracil
  modified_base 2821: mod_base = OTHER; note = N1-methylpseudouracil
  modified_base 2824: mod_base = OTHER; note = N1-methylpseudouracil
  modified_base 2827: mod_base = OTHER; note = N1-methylpseudouracil
  modified_base 2841: mod_base = OTHER; note = N1-methylpseudouracil
  modified_base 2844: mod_base = OTHER; note = N1-methylpseudouracil
  modified_base 2847: mod_base = OTHER; note = N1-methylpseudouracil
  modified_base 2851: mod_base = OTHER; note = N1-methylpseudouracil
  modified_base 2853: mod_base = OTHER; note = N1-methylpseudouracil
  modified_base 2854: mod_base = OTHER; note = N1-methylpseudouracil
  modified_base 2856: mod_base = OTHER; note = N1-methylpseudouracil
  modified_base 2860: mod_base = OTHER; note = N1-methylpseudouracil
  modified_base 2862: mod_base = OTHER; note = N1-methylpseudouracil
  modified_base 2866: mod_base = OTHER; note = N1-methylpseudouracil
  modified_base 2872: mod_base = OTHER; note = N1-methylpseudouracil
  modified_base 2884: mod_base = OTHER; note = N1-methylpseudouracil
  modified_base 2887: mod_base = OTHER; note = N1-methylpseudouracil
  modified_base 2893: mod_base = OTHER; note = N1-methylpseudouracil
  modified_base 2898: mod_base = OTHER; note = N1-methylpseudouracil
  modified_base 2899: mod_base = OTHER; note = N1-methylpseudouracil
  modified_base 2901: mod_base = OTHER; note = N1-methylpseudouracil
  modified_base 2902: mod_base = OTHER; note = N1-methylpseudouracil
  modified_base 2911: mod_base = OTHER; note = N1-methylpseudouracil
  modified_base 2915: mod_base = OTHER; note = N1-methylpseudouracil
  modified_base 2917: mod_base = OTHER; note = N1-methylpseudouracil
  modified_base 2920: mod_base = OTHER; note = N1-methylpseudouracil
  modified_base 2929: mod_base = OTHER; note = N1-methylpseudouracil
  modified_base 2932: mod_base = OTHER; note = N1-methylpseudouracil
  modified_base 2938: mod_base = OTHER; note = N1-methylpseudouracil
  modified_base 2947: mod_base = OTHER; note = N1-methylpseudouracil
  modified_base 2950: mod_base = OTHER; note = N1-methylpseudouracil
  modified_base 2962: mod_base = OTHER; note = N1-methylpseudouracil
  modified_base 2965: mod_base = OTHER; note = N1-methylpseudouracil
  modified_base 2974: mod_base = OTHER; note = N1-methylpseudouracil
  modified_base 2977: mod_base = OTHER; note = N1-methylpseudouracil
  modified_base 2987: mod_base = OTHER; note = N1-methylpseudouracil
  modified_base 2989: mod_base = OTHER; note = N1-methylpseudouracil
  modified_base 2998: mod_base = OTHER; note = N1-methylpseudouracil
  modified_base 3007: mod_base = OTHER; note = N1-methylpseudouracil
  modified_base 3022: mod_base = OTHER; note = N1-methylpseudouracil
  modified_base 3025: mod_base = OTHER; note = N1-methylpseudouracil
  modified_base 3033: mod_base = OTHER; note = N1-methylpseudouracil
  modified_base 3034: mod_base = OTHER; note = N1-methylpseudouracil
  modified_base 3046: mod_base = OTHER; note = N1-methylpseudouracil
  modified_base 3052: mod_base = OTHER; note = N1-methylpseudouracil
  modified_base 3055: mod_base = OTHER; note = N1-methylpseudouracil
  modified_base 3064: mod_base = OTHER; note = N1-methylpseudouracil
  modified_base 3067: mod_base = OTHER; note = N1-methylpseudouracil
  modified_base 3073: mod_base = OTHER; note = N1-methylpseudouracil
  modified_base 3079: mod_base = OTHER; note = N1-methylpseudouracil
  modified_base 3081: mod_base = OTHER; note = N1-methylpseudouracil
  modified_base 3082: mod_base = OTHER; note = N1-methylpseudouracil
  modified_base 3087: mod_base = OTHER; note = N1-methylpseudouracil
  modified_base 3088: mod_base = OTHER; note = N1-methylpseudouracil
  modified_base 3091: mod_base = OTHER; note = N1-methylpseudouracil
  modified_base 3097: mod_base = OTHER; note = N1-methylpseudouracil
  modified_base 3100: mod_base = OTHER; note = N1-methylpseudouracil
  modified_base 3103: mod_base = OTHER; note = N1-methylpseudouracil
  modified_base 3106: mod_base = OTHER; note = N1-methylpseudouracil
  modified_base 3109: mod_base = OTHER; note = N1-methylpseudouracil
  modified_base 3112: mod_base = OTHER; note = N1-methylpseudouracil
  modified_base 3121: mod_base = OTHER; note = N1-methylpseudouracil
  modified_base 3127: mod_base = OTHER; note = N1-methylpseudouracil
  modified_base 3130: mod_base = OTHER; note = N1-methylpseudouracil
  modified_base 3136: mod_base = OTHER; note = N1-methylpseudouracil
  modified_base 3139: mod_base = OTHER; note = N1-methylpseudouracil
  modified_base 3147: mod_base = OTHER; note = N1-methylpseudouracil
  modified_base 3151: mod_base = OTHER; note = N1-methylpseudouracil
  modified_base 3153: mod_base = OTHER; note = N1-methylpseudouracil
  modified_base 3154: mod_base = OTHER; note = N1-methylpseudouracil
  modified_base 3157: mod_base = OTHER; note = N1-methylpseudouracil
  modified_base 3166: mod_base = OTHER; note = N1-methylpseudouracil
  modified_base 3172: mod_base = OTHER; note = N1-methylpseudouracil
  modified_base 3175: mod_base = OTHER; note = N1-methylpseudouracil
  modified_base 3178: mod_base = OTHER; note = N1-methylpseudouracil
  modified_base 3183: mod_base = OTHER; note = N1-methylpseudouracil
  modified_base 3184: mod_base = OTHER; note = N1-methylpseudouracil
  modified_base 3187: mod_base = OTHER; note = N1-methylpseudouracil
  modified_base 3190: mod_base = OTHER; note = N1-methylpseudouracil
  modified_base 3193: mod_base = OTHER; note = N1-methylpseudouracil
  modified_base 3201: mod_base = OTHER; note = N1-methylpseudouracil
  modified_base 3204: mod_base = OTHER; note = N1-methylpseudouracil
  modified_base 3205: mod_base = OTHER; note = N1-methylpseudouracil
  modified_base 3208: mod_base = OTHER; note = N1-methylpseudouracil
  modified_base 3226: mod_base = OTHER; note = N1-methylpseudouracil
  modified_base 3235: mod_base = OTHER; note = N1-methylpseudouracil
  modified_base 3252: mod_base = OTHER; note = N1-methylpseudouracil
  modified_base 3257: mod_base = OTHER; note = N1-methylpseudouracil
  modified_base 3259: mod_base = OTHER; note = N1-methylpseudouracil
  modified_base 3261: mod_base = OTHER; note = N1-methylpseudouracil
  modified_base 3262: mod_base = OTHER; note = N1-methylpseudouracil
  modified_base 3271: mod_base = OTHER; note = N1-methylpseudouracil
  modified_base 3274: mod_base = OTHER; note = N1-methylpseudouracil
  modified_base 3283: mod_base = OTHER; note = N1-methylpseudouracil
  modified_base 3292: mod_base = OTHER; note = N1-methylpseudouracil
  modified_base 3294: mod_base = OTHER; note = N1-methylpseudouracil
  modified_base 3301: mod_base = OTHER; note = N1-methylpseudouracil
  modified_base 3308: mod_base = OTHER; note = N1-methylpseudouracil
  modified_base 3309: mod_base = OTHER; note = N1-methylpseudouracil
  modified_base 3310: mod_base = OTHER; note = N1-methylpseudouracil
  modified_base 3324: mod_base = OTHER; note = N1-methylpseudouracil
  modified_base 3327: mod_base = OTHER; note = N1-methylpseudouracil
  modified_base 3328: mod_base = OTHER; note = N1-methylpseudouracil
  modified_base 3337: mod_base = OTHER; note = N1-methylpseudouracil
  modified_base 3339: mod_base = OTHER; note = N1-methylpseudouracil
  modified_base 3340: mod_base = OTHER; note = N1-methylpseudouracil
  modified_base 3352: mod_base = OTHER; note = N1-methylpseudouracil
  modified_base 3358: mod_base = OTHER; note = N1-methylpseudouracil
  modified_base 3372: mod_base = OTHER; note = N1-methylpseudouracil
  modified_base 3375: mod_base = OTHER; note = N1-methylpseudouracil
  modified_base 3376: mod_base = OTHER; note = N1-methylpseudouracil
  modified_base 3379: mod_base = OTHER; note = N1-methylpseudouracil
  modified_base 3381: mod_base = OTHER; note = N1-methylpseudouracil
  modified_base 3385: mod_base = OTHER; note = N1-methylpseudouracil
  modified_base 3387: mod_base = OTHER; note = N1-methylpseudouracil
  modified_base 3394: mod_base = OTHER; note = N1-methylpseudouracil
  modified_base 3399: mod_base = OTHER; note = N1-methylpseudouracil
  modified_base 3402: mod_base = OTHER; note = N1-methylpseudouracil
  modified_base 3403: mod_base = OTHER; note = N1-methylpseudouracil
  modified_base 3409: mod_base = OTHER; note = N1-methylpseudouracil
  modified_base 3415: mod_base = OTHER; note = N1-methylpseudouracil
  modified_base 3421: mod_base = OTHER; note = N1-methylpseudouracil
  modified_base 3424: mod_base = OTHER; note = N1-methylpseudouracil
  modified_base 3426: mod_base = OTHER; note = N1-methylpseudouracil
  modified_base 3427: mod_base = OTHER; note = N1-methylpseudouracil
  modified_base 3430: mod_base = OTHER; note = N1-methylpseudouracil
  modified_base 3433: mod_base = OTHER; note = N1-methylpseudouracil
  modified_base 3435: mod_base = OTHER; note = N1-methylpseudouracil
  modified_base 3436: mod_base = OTHER; note = N1-methylpseudouracil
  modified_base 3438: mod_base = OTHER; note = N1-methylpseudouracil
  modified_base 3439: mod_base = OTHER; note = N1-methylpseudouracil
  modified_base 3442: mod_base = OTHER; note = N1-methylpseudouracil
  modified_base 3448: mod_base = OTHER; note = N1-methylpseudouracil
  modified_base 3453: mod_base = OTHER; note = N1-methylpseudouracil
  modified_base 3454: mod_base = OTHER; note = N1-methylpseudouracil
  modified_base 3457: mod_base = OTHER; note = N1-methylpseudouracil
  modified_base 3459: mod_base = OTHER; note = N1-methylpseudouracil
  modified_base 3463: mod_base = OTHER; note = N1-methylpseudouracil
  modified_base 3466: mod_base = OTHER; note = N1-methylpseudouracil
  modified_base 3473: mod_base = OTHER; note = N1-methylpseudouracil
  modified_base 3488: mod_base = OTHER; note = N1-methylpseudouracil
  modified_base 3493: mod_base = OTHER; note = N1-methylpseudouracil
  modified_base 3499: mod_base = OTHER; note = N1-methylpseudouracil
  modified_base 3502: mod_base = OTHER; note = N1-methylpseudouracil
  modified_base 3505: mod_base = OTHER; note = N1-methylpseudouracil
  modified_base 3511: mod_base = OTHER; note = N1-methylpseudouracil
  modified_base 3517: mod_base = OTHER; note = N1-methylpseudouracil
  modified_base 3523: mod_base = OTHER; note = N1-methylpseudouracil
  modified_base 3526: mod_base = OTHER; note = N1-methylpseudouracil
  modified_base 3528: mod_base = OTHER; note = N1-methylpseudouracil
  modified_base 3535: mod_base = OTHER; note = N1-methylpseudouracil
  modified_base 3540: mod_base = OTHER; note = N1-methylpseudouracil
  modified_base 3547: mod_base = OTHER; note = N1-methylpseudouracil
  modified_base 3555: mod_base = OTHER; note = N1-methylpseudouracil
  modified_base 3559: mod_base = OTHER; note = N1-methylpseudouracil
  modified_base 3565: mod_base = OTHER; note = N1-methylpseudouracil
  modified_base 3574: mod_base = OTHER; note = N1-methylpseudouracil
  modified_base 3577: mod_base = OTHER; note = N1-methylpseudouracil
  modified_base 3582: mod_base = OTHER; note = N1-methylpseudouracil
  modified_base 3586: mod_base = OTHER; note = N1-methylpseudouracil
  modified_base 3588: mod_base = OTHER; note = N1-methylpseudouracil
  modified_base 3595: mod_base = OTHER; note = N1-methylpseudouracil
  modified_base 3597: mod_base = OTHER; note = N1-methylpseudouracil
  modified_base 3598: mod_base = OTHER; note = N1-methylpseudouracil
  modified_base 3603: mod_base = OTHER; note = N1-methylpseudouracil
  modified_base 3604: mod_base = OTHER; note = N1-methylpseudouracil
  modified_base 3607: mod_base = OTHER; note = N1-methylpseudouracil
  modified_base 3613: mod_base = OTHER; note = N1-methylpseudouracil
  modified_base 3651: mod_base = OTHER; note = N1-methylpseudouracil
  modified_base 3667: mod_base = OTHER; note = N1-methylpseudouracil
  modified_base 3669: mod_base = OTHER; note = N1-methylpseudouracil
  modified_base 3676: mod_base = OTHER; note = N1-methylpseudouracil
  modified_base 3679: mod_base = OTHER; note = N1-methylpseudouracil
  modified_base 3682: mod_base = OTHER; note = N1-methylpseudouracil
  modified_base 3685: mod_base = OTHER; note = N1-methylpseudouracil
  modified_base 3700: mod_base = OTHER; note = N1-methylpseudouracil
  modified_base 3715: mod_base = OTHER; note = N1-methylpseudouracil
  modified_base 3716: mod_base = OTHER; note = N1-methylpseudouracil
  modified_base 3717: mod_base = OTHER; note = N1-methylpseudouracil
  modified_base 3723: mod_base = OTHER; note = N1-methylpseudouracil
  modified_base 3736: mod_base = OTHER; note = N1-methylpseudouracil
  modified_base 3742: mod_base = OTHER; note = N1-methylpseudouracil
  modified_base 3751: mod_base = OTHER; note = N1-methylpseudouracil
  modified_base 3762: mod_base = OTHER; note = N1-methylpseudouracil
  modified_base 3784: mod_base = OTHER; note = N1-methylpseudouracil
  modified_base 3787: mod_base = OTHER; note = N1-methylpseudouracil
  modified_base 3796: mod_base = OTHER; note = N1-methylpseudouracil
  modified_base 3801: mod_base = OTHER; note = N1-methylpseudouracil
  modified_base 3802: mod_base = OTHER; note = N1-methylpseudouracil
  modified_base 3804: mod_base = OTHER; note = N1-methylpseudouracil
  modified_base 3808: mod_base = OTHER; note = N1-methylpseudouracil
  modified_base 3818: mod_base = OTHER; note = N1-methylpseudouracil
  modified_base 3826: mod_base = OTHER; note = N1-methylpseudouracil
  modified_base 3832: mod_base = OTHER; note = N1-methylpseudouracil
  modified_base 3835: mod_base = OTHER; note = N1-methylpseudouracil
  modified_base 3845: mod_base = OTHER; note = N1-methylpseudouracil
  modified_base 3865: mod_base = OTHER; note = N1-methylpseudouracil
  modified_base 3868: mod_base = OTHER; note = N1-methylpseudouracil
  modified_base 3870: mod_base = OTHER; note = N1-methylpseudouracil
  modified_base 3876: mod_base = OTHER; note = N1-methylpseudouracil
  modified_base 3877: mod_base = OTHER; note = N1-methylpseudouracil
  modified_base 3880: mod_base = OTHER; note = N1-methylpseudouracil
  modified_base 3886: mod_base = OTHER; note = N1-methylpseudouracil
  modified_base 3889: mod_base = OTHER; note = N1-methylpseudouracil
  modified_base 3907: mod_base = OTHER; note = N1-methylpseudouracil
  modified_base 3913: mod_base = OTHER; note = N1-methylpseudouracil
  modified_base 3922: mod_base = OTHER; note = N1-methylpseudouracil
  modified_base 3924: mod_base = OTHER; note = N1-methylpseudouracil
  modified_base 3927: mod_base = OTHER; note = N1-methylpseudouracil
  modified_base 3937: mod_base = OTHER; note = N1-methylpseudouracil
  modified_base 3943: mod_base = OTHER; note = N1-methylpseudouracil
  modified_base 3951: mod_base = OTHER; note = N1-methylpseudouracil
  modified_base 3963: mod_base = OTHER; note = N1-methylpseudouracil
  modified_base 3964: mod_base = OTHER; note = N1-methylpseudouracil
  modified_base 3970: mod_base = OTHER; note = N1-methylpseudouracil
  modified_base 3973: mod_base = OTHER; note = N1-methylpseudouracil
  modified_base 3985: mod_base = OTHER; note = N1-methylpseudouracil
  modified_base 3987: mod_base = OTHER; note = N1-methylpseudouracil
  modified_base 3988: mod_base = OTHER; note = N1-methylpseudouracil
  modified_base 3991: mod_base = OTHER; note = N1-methylpseudouracil
  modified_base 3993: mod_base = OTHER; note = N1-methylpseudouracil
  modified_base 3994: mod_base = OTHER; note = N1-methylpseudouracil
  modified_base 4005: mod_base = OTHER; note = N1-methylpseudouracil
  modified_base 4006: mod_base = OTHER; note = N1-methylpseudouracil
  modified_base 4018: mod_base = OTHER; note = N1-methylpseudouracil
  modified_base 4026: mod_base = OTHER; note = N1-methylpseudouracil
  modified_base 4035: mod_base = OTHER; note = N1-methylpseudouracil
  modified_base 4051: mod_base = OTHER; note = N1-methylpseudouracil
  modified_base 4053: mod_base = OTHER; note = N1-methylpseudouracil
  modified_base 4060: mod_base = OTHER; note = N1-methylpseudouracil
  modified_base 4072: mod_base = OTHER; note = N1-methylpseudouracil
  modified_base 4078: mod_base = OTHER; note = N1-methylpseudouracil
  modified_base 4087: mod_base = OTHER; note = N1-methylpseudouracil
  modified_base 4090: mod_base = OTHER; note = N1-methylpseudouracil
  modified_base 4098: mod_base = OTHER; note = N1-methylpseudouracil
  modified_base 4099: mod_base = OTHER; note = N1-methylpseudouracil
  modified_base 4111: mod_base = OTHER; note = N1-methylpseudouracil
  modified_base 4116: mod_base = OTHER; note = N1-methylpseudouracil
  modified_base 4117: mod_base = OTHER; note = N1-methylpseudouracil
  modified_base 4120: mod_base = OTHER; note = N1-methylpseudouracil
  modified_base 4123: mod_base = OTHER; note = N1-methylpseudouracil
  modified_base 4126: mod_base = OTHER; note = N1-methylpseudouracil
  modified_base 4137: mod_base = OTHER; note = N1-methylpseudouracil
  modified_base 4141: mod_base = OTHER; note = N1-methylpseudouracil
  modified_base 4144: mod_base = OTHER; note = N1-methylpseudouracil
  modified_base 4165: mod_base = OTHER; note = N1-methylpseudouracil
  modified_base 4168: mod_base = OTHER; note = N1-methylpseudouracil
  modified_base 4170: mod_base = OTHER; note = N1-methylpseudouracil
  modified_base 4173: mod_base = OTHER; note = N1-methylpseudouracil
  modified_base 4174: mod_base = OTHER; note = N1-methylpseudouracil
  modified_base 4186: mod_base = OTHER; note = N1-methylpseudouracil
  modified_base 4189: mod_base = OTHER; note = N1-methylpseudouracil
  modified_base 4191: mod_base = OTHER; note = N1-methylpseudouracil
  modified_base 4204: mod_base = OTHER; note = N1-methylpseudouracil
  modified_base 4207: mod_base = OTHER; note = N1-methylpseudouracil
  modified_base 4210: mod_base = OTHER; note = N1-methylpseudouracil
  modified_base 4213: mod_base = OTHER; note = N1-methylpseudouracil
  modified_base 4224: mod_base = OTHER; note = N1-methylpseudouracil
  modified_base 4234: mod_base = OTHER; note = N1-methylpseudouracil
  modified_base 4243: mod_base = OTHER; note = N1-methylpseudouracil
  modified_base 4248: mod_base = OTHER; note = N1-methylpseudouracil
  modified_base 4255: mod_base = OTHER; note = N1-methylpseudouracil
  modified_base 4258: mod_base = OTHER; note = N1-methylpseudouracil
  modified_base 4270: mod_base = OTHER; note = N1-methylpseudouracil
  modified_base 4281: mod_base = OTHER; note = N1-methylpseudouracil
  modified_base 4282: mod_base = OTHER; note = N1-methylpseudouracil
  modified_base 4290: mod_base = OTHER; note = N1-methylpseudouracil
  modified_base 4297: mod_base = OTHER; note = N1-methylpseudouracil
  modified_base 4300: mod_base = OTHER; note = N1-methylpseudouracil
  modified_base 4303: mod_base = OTHER; note = N1-methylpseudouracil
  modified_base 4305: mod_base = OTHER; note = N1-methylpseudouracil
  modified_base 4318: mod_base = OTHER; note = N1-methylpseudouracil
  modified_base 4327: mod_base = OTHER; note = N1-methylpseudouracil
  modified_base 4330: mod_base = OTHER; note = N1-methylpseudouracil
  modified_base 4335: mod_base = OTHER; note = N1-methylpseudouracil
  modified_base 4344: mod_base = OTHER; note = N1-methylpseudouracil
  modified_base 4345: mod_base = OTHER; note = N1-methylpseudouracil
  modified_base 4348: mod_base = OTHER; note = N1-methylpseudouracil
  modified_base 4351: mod_base = OTHER; note = N1-methylpseudouracil
  modified_base 4354: mod_base = OTHER; note = N1-methylpseudouracil
  modified_base 4369: mod_base = OTHER; note = N1-methylpseudouracil
  modified_base 4377: mod_base = OTHER; note = N1-methylpseudouracil
  modified_base 4387: mod_base = OTHER; note = N1-methylpseudouracil
  modified_base 4396: mod_base = OTHER; note = N1-methylpseudouracil
  modified_base 4399: mod_base = OTHER; note = N1-methylpseudouracil
  modified_base 4414: mod_base = OTHER; note = N1-methylpseudouracil
  modified_base 4416: mod_base = OTHER; note = N1-methylpseudouracil
  modified_base 4417: mod_base = OTHER; note = N1-methylpseudouracil
  modified_base 4429: mod_base = OTHER; note = N1-methylpseudouracil
  modified_base 4447: mod_base = OTHER; note = N1-methylpseudouracil
  modified_base 4453: mod_base = OTHER; note = N1-methylpseudouracil
  modified_base 4455: mod_base = OTHER; note = N1-methylpseudouracil
  modified_base 4456: mod_base = OTHER; note = N1-methylpseudouracil
  modified_base 4479: mod_base = OTHER; note = N1-methylpseudouracil
  modified_base 4485: mod_base = OTHER; note = N1-methylpseudouracil
  modified_base 4498: mod_base = OTHER; note = N1-methylpseudouracil
  modified_base 4507: mod_base = OTHER; note = N1-methylpseudouracil
  modified_base 4531: mod_base = OTHER; note = N1-methylpseudouracil
  modified_base 4546: mod_base = OTHER; note = N1-methylpseudouracil
  modified_base 4548: mod_base = OTHER; note = N1-methylpseudouracil
  modified_base 4554: mod_base = OTHER; note = N1-methylpseudouracil
  modified_base 4566: mod_base = OTHER; note = N1-methylpseudouracil
  modified_base 4575: mod_base = OTHER; note = N1-methylpseudouracil
  modified_base 4576: mod_base = OTHER; note = N1-methylpseudouracil
  modified_base 4578: mod_base = OTHER; note = N1-methylpseudouracil
  modified_base 4582: mod_base = OTHER; note = N1-methylpseudouracil
  modified_base 4583: mod_base = OTHER; note = N1-methylpseudouracil
  modified_base 4586: mod_base = OTHER; note = N1-methylpseudouracil
  modified_base 4589: mod_base = OTHER; note = N1-methylpseudouracil
  modified_base 4594: mod_base = OTHER; note = N1-methylpseudouracil
  modified_base 4597: mod_base = OTHER; note = N1-methylpseudouracil
  modified_base 4600: mod_base = OTHER; note = N1-methylpseudouracil
  modified_base 4611: mod_base = OTHER; note = N1-methylpseudouracil
  modified_base 4619: mod_base = OTHER; note = N1-methylpseudouracil
  modified_base 4627: mod_base = OTHER; note = N1-methylpseudouracil
  modified_base 4630: mod_base = OTHER; note = N1-methylpseudouracil
  modified_base 4632: mod_base = OTHER; note = N1-methylpseudouracil
  modified_base 4633: mod_base = OTHER; note = N1-methylpseudouracil
  modified_base 4634: mod_base = OTHER; note = N1-methylpseudouracil
  modified_base 4638: mod_base = OTHER; note = N1-methylpseudouracil
  modified_base 4643: mod_base = OTHER; note = N1-methylpseudouracil
  modified_base 4645: mod_base = OTHER; note = N1-methylpseudouracil
  modified_base 4649: mod_base = OTHER; note = N1-methylpseudouracil
ggaggaaatttttttttgatattataagagtttttttttgatattaagaaaatttttttttgatattagaagagtaagaagaaatataagaccccggcgccgccaccatgcagaggagcccgctggagaaggccagcgtggtgtccaagctgttcttctcctggacccggcccatcctgcggaagggataccggcagcggctggagctgagcgacatctaccagatccccagcgtggactccgccgacaacctgagcgagaagctggagcgggagtgggaccgggagctggcctccaagaagaaccccaagctgatcaacgccctgcgccggtgcttcttctggcggttcatgttctacggcatcttcctgtacctgggcgaggtgaccaaggccgtgcagcccctgctgttgggccgcatcatcgccagctacgaccccgacaacaaggaggagcgcagcatcgccatctacctgggcatcggcctgtgcctgctcttcatcgtgcgcaccctgctgctgcaccccgccatcttcggcctgcaccacatcgggatgcagatgcggatcgccatgttcagcctcatctacaagaagaccctgaagctgtccagcagggtgctggacaagatcagcatcgggcagctggtgagcctgctgtccaacaacctgaacaagttcgacgagggcctggccctagcccacttcgtgtggatcgcccctctgcaggtggccctgctgatgggcctgatctgggagctgctgcaggcctccgccttctgcgggctgggcttcctgatcgtgctggccctgtttcaggcagggctgggacggatgatgatgaagtatcgggaccagcgggctggaaagatctccgagcgactggtaatcaccagcgaaatgatcgagaacatccagtccgtgaaggcctactgctgggaggaggccatggagaagatgatcgagaatctgcggcagaccgagctgaagctgaccagaaaggccgcctacgtgaggtacttcaacagctccgccttcttcttcagcggcttcttcgtggtgttcctgtccgtgctgccttacgccctgatcaagggcatcatcctgaggaagatcttcaccaccatcagcttctgcatcgtgctgcggatggccgtgacccgccagttcccctgggccgtgcagacctggtacgacagcctgggcgccatcaacaagatccaggacttcctgcagaagcaggagtacaagaccctggagtacaacctgaccaccaccgaggtggtgatggagaacgtgaccgccttctgggaggagggcttcggcgagctgttcgagaaggccaagcagaacaacaacaaccggaagaccagcaacggcgacgacagcctgttcttctccaacttcagcctgctgggcaccccagtgctgaaggacatcaacttcaagatcgagcggggacagttgctggctgtggccggctccaccggcgccggaaagactagcctgctgatgatgatcatgggcgagctggagccctccgaggggaagatcaagcactcaggccggatcagcttctgcagccagttctcttggatcatgcccggcaccatcaaggagaacatcatcttcggcgtgtcctacgacgagtaccggtaccggagcgtgatcaaggcctgccagctggaggaggacatcagcaagttcgccgagaaggacaacatcgtgctgggcgagggaggcatcaccctgagcggaggccaacgggcaaggatcagcctggccagggccgtgtacaaggacgctgacctgtacctgctggacagccccttcggctacctggacgtgctgaccgagaaggagatcttcgagtcctgcgtgtgcaagctgatggccaacaagacccgcatcctggtgaccagcaagatggagcacctgaagaaggccgacaagatcctgatcctgcacgagggatccagctacttctacggcaccttcagcgagctgcagaacctgcagcccgacttcagcagcaagcttatggggtgcgacagcttcgaccagttctccgctgagcgccggaattccatcctgaccgagaccctgcaccgcttctccctggagggcgacgctcccgtgagctggaccgagaccaagaagcagtccttcaagcagaccggggagttcggcgagaagcggaagaacagcatcctgaaccccatcaacagcatccggaagttctccatcgtccagaagacacccctgcagatgaacgggatcgaggaggacagcgacgagcccttggagcggcgcctgagcctggtgcccgacagcgagcagggcgaggccatcctgccccgcatctccgtgatcagcaccggccccacactgcaggcccggagacgccagtccgtgctgaacctgatgacccactccgtgaaccaggggcagaacatccatcggaagaccaccgcctccacccggaaggtgagcctggccccacaggccaacctgaccgagctggatatctactcccggaggctgagccaggagaccggcctggagatcagcgaggagatcaacgaggaggacctgaaggagtgcttcttcgacgacatggagtccatccccgccgtgaccacctggaacacctacctgcgctacatcaccgtgcacaagtccctgatcttcgtgctcatctggtgcctggtgatcttccttgccgaagtcgccgccagcctggtggtgctgtggctgctgggcaacacccctctgcaggataagggcaacagcacccacagccggaacaacagctacgccgtgatcatcaccagcaccagctcctactacgtgttctacatctacgtgggagtggccgacaccctgctggccatgggcttcttccggggcctgcctctggtgcacaccctgatcaccgtgagcaagatcctgcaccacaagatgctgcacagcgtgctgcaggcccctatgagcaccctgaacaccctgaaggccggcgggatcctgaacaggttcagcaaggacatcgccatcctggacgacctgctgcccctgaccatcttcgacttcatccagctgctgctgatcgtgatcggcgccatcgccgtggtggccgtgctgcagccctacatcttcgtggccacagtgcccgtgatcgtggccttcatcatgctgagggcatacttcctgcagaccagccagcagctgaagcagctggagagcgaggggagatcccctatcttcacccacctggtgaccagcctgaagggactgtggaccctgcgcgctttcggccgccagccctacttcgagaccctgttccacaaggccctgaacctccacaccgccaactggttcctgtacctgtccaccctgaggtggttccagatgcggatcgagatgatcttcgtgatcttcttcatcgccgtgaccttcatctccatcctgaccactggcgaaggggagggtagggtgggcatcatcctcaccctggccatgaacatcatgtcaaccctgcagtgggccgtgaacagctccatcgacgtggacagcctgatgaggtccgtgtcccgggtgttcaagttcatcgacatgcccaccgagggcaagcccaccaagagcaccaagccatacaagaacggccagctgtccaaggtgatgatcatcgagaacagccacgtgaagaaggacgacatttggccctccggcgggcaaatgaccgtgaaggacctgaccgccaagtacaccgagggcggcaacgccatcctggagaacatcagcttctccatcagccccggtcagagggtcggactgctgggcaggactggcagcgggaagagcacactgctgtccgccttcctgcgcctgctgaacaccgaaggggagatccagatcgacggcgtgtcctgggacagcatcaccctgcagcagtggcgcaaggccttcggggtgatcccacagaaggtgttcatcttcagcggcaccttccggaagaacctggacccctacgagcagtggagcgaccaggagatctggaaggtggccgacgaggtgggcctgcgcagcgtgatcgagcagttccccggcaagctggacttcgtgctggtggacggcggctgcgtgctgagccacggccacaagcagctgatgtgcttggcccggagcgtgctgtccaaggccaagatcctcctgctggacgagccctcagcccacctcgaccccgtgacctaccagatcatccggcggaccctgaagcaggccttcgccgactgcaccgtgatcctgtgcgagcaccggatcgaggccatgctggagtgccagcagttcctggtgatcgaggagaacaaggtgcggcagtacgacagcatccagaagctgctgaacgagcggagcctgttccggcaggccatcagccccagcgaccgggtgaagctgttcccacaccgcaacagcagcaagtgcaagtccaagccccagatcgccgccctgaaggaggagaccgaggaggaggtgcaggacaccaggctgtaaagctccccgggggcctccaccgcgttatccgttcctcgtaggctggtcctggggaacgggtcggcgggtacccccgtggtctttgaataaagtctgagtgggcggcaaaaaaaaaaaaaaaaaaaaaaaaaaaaaaaaaaaaaaaaaaaaaaaaaaaaaaaaaaaaaaaaaaaaaaaaaaaaaaaaaaaaaaaaaaaaaaaaaaaa

SEQ ID NO: 17 - RNA, 4737 nt, synthetic construct
  source 1..4737: mol_type = other RNA
  modified_base 1: mod_base = OTHER; note = 7-Methylguanosine with triphosphate linkage
  modified_base 2: mod_base = OTHER; note = 2'-O-methyl modified nucleotide
  modified_base 9: mod_base = OTHER; note = N1-methylpseudouracil
  modified_base 17: mod_base = OTHER; note = N1-methylpseudouracil
  modified_base 18: mod_base = OTHER; note = N1-methylpseudouracil
  modified_base 19: mod_base = OTHER; note = N1-methylpseudouracil
  modified_base 22: mod_base = OTHER; note = N1-methylpseudouracil
  modified_base 24: mod_base = OTHER; note = N1-methylpseudouracil
  modified_base 25: mod_base = OTHER; note = N1-methylpseudouracil
  modified_base 30: mod_base = OTHER; note = N1-methylpseudouracil
  modified_base 31: mod_base = OTHER; note = N1-methylpseudouracil
  modified_base 35: mod_base = OTHER; note = N1-methylpseudouracil
  modified_base 36: mod_base = OTHER; note = N1-methylpseudouracil
  modified_base 37: mod_base = OTHER; note = N1-methylpseudouracil
  modified_base 39: mod_base = OTHER; note = N1-methylpseudouracil
  modified_base 40: mod_base = OTHER; note = N1-methylpseudouracil
  modified_base 41: mod_base = OTHER; note = N1-methylpseudouracil
  modified_base 42: mod_base = OTHER; note = N1-methylpseudouracil
  modified_base 45: mod_base = OTHER; note = N1-methylpseudouracil
  modified_base 46: mod_base = OTHER; note = N1-methylpseudouracil
  modified_base 47: mod_base = OTHER; note = N1-methylpseudouracil
  modified_base 48: mod_base = OTHER; note = N1-methylpseudouracil
  modified_base 50: mod_base = OTHER; note = N1-methylpseudouracil
  modified_base 57: mod_base = OTHER; note = N1-methylpseudouracil
  modified_base 65: mod_base = OTHER; note = N1-methylpseudouracil
  modified_base 66: mod_base = OTHER; note = N1-methylpseudouracil
  modified_base 67: mod_base = OTHER; note = N1-methylpseudouracil
  modified_base 68: mod_base = OTHER; note = N1-methylpseudouracil
  modified_base 69: mod_base = OTHER; note = N1-methylpseudouracil
  modified_base 71: mod_base = OTHER; note = N1-methylpseudouracil
  modified_base 72: mod_base = OTHER; note = N1-methylpseudouracil
  modified_base 74: mod_base = OTHER; note = N1-methylpseudouracil
  modified_base 80: mod_base = OTHER; note = N1-methylpseudouracil
  modified_base 93: mod_base = OTHER; note = N1-methylpseudouracil
  modified_base 95: mod_base = OTHER; note = N1-methylpseudouracil
  modified_base 110: mod_base = OTHER; note = N1-methylpseudouracil
  modified_base 113: mod_base = OTHER; note = N1-methylpseudouracil
  modified_base 122: mod_base = OTHER; note = N1-methylpseudouracil
  modified_base 124: mod_base = OTHER; note = N1-methylpseudouracil
  modified_base 125: mod_base = OTHER; note = N1-methylpseudouracil
  modified_base 127: mod_base = OTHER; note = N1-methylpseudouracil
  modified_base 128: mod_base = OTHER; note = N1-methylpseudouracil
  modified_base 133: mod_base = OTHER; note = N1-methylpseudouracil
  modified_base 146: mod_base = OTHER; note = N1-methylpseudouracil
  modified_base 149: mod_base = OTHER; note = N1-methylpseudouracil
  modified_base 160: mod_base = OTHER; note = N1-methylpseudouracil
  modified_base 173: mod_base = OTHER; note = N1-methylpseudouracil
  modified_base 179: mod_base = OTHER; note = N1-methylpseudouracil
  modified_base 181: mod_base = OTHER; note = N1-methylpseudouracil
  modified_base 188: mod_base = OTHER; note = N1-methylpseudouracil
  modified_base 190: mod_base = OTHER; note = N1-methylpseudouracil
  modified_base 197: mod_base = OTHER; note = N1-methylpseudouracil
  modified_base 198: mod_base = OTHER; note = N1-methylpseudouracil
  modified_base 202: mod_base = OTHER; note = N1-methylpseudouracil
  modified_base 206: mod_base = OTHER; note = N1-methylpseudouracil
  modified_base 222: mod_base = OTHER; note = N1-methylpseudouracil
  modified_base 224: mod_base = OTHER; note = N1-methylpseudouracil
  modified_base 236: mod_base = OTHER; note = N1-methylpseudouracil
  modified_base 247: mod_base = OTHER; note = N1-methylpseudouracil
  modified_base 260: mod_base = OTHER; note = N1-methylpseudouracil
  modified_base 279: mod_base = OTHER; note = N1-methylpseudouracil
  modified_base 284: mod_base = OTHER; note = N1-methylpseudouracil
  modified_base 287: mod_base = OTHER; note = N1-methylpseudouracil
  modified_base 296: mod_base = OTHER; note = N1-methylpseudouracil
  modified_base 304: mod_base = OTHER; note = N1-methylpseudouracil
  modified_base 307: mod_base = OTHER; note = N1-methylpseudouracil
  modified_base 308: mod_base = OTHER; note = N1-methylpseudouracil
  modified_base 310: mod_base = OTHER; note = N1-methylpseudouracil
  modified_base 311: mod_base = OTHER; note = N1-methylpseudouracil
  modified_base 313: mod_base = OTHER; note = N1-methylpseudouracil
  modified_base 319: mod_base = OTHER; note = N1-methylpseudouracil
  modified_base 320: mod_base = OTHER; note = N1-methylpseudouracil
  modified_base 323: mod_base = OTHER; note = N1-methylpseudouracil
  modified_base 325: mod_base = OTHER; note = N1-methylpseudouracil
  modified_base 326: mod_base = OTHER; note = N1-methylpseudouracil
  modified_base 328: mod_base = OTHER; note = N1-methylpseudouracil
  modified_base 335: mod_base = OTHER; note = N1-methylpseudouracil
  modified_base 337: mod_base = OTHER; note = N1-methylpseudouracil
  modified_base 338: mod_base = OTHER; note = N1-methylpseudouracil
  modified_base 341: mod_base = OTHER; note = N1-methylpseudouracil
  modified_base 343: mod_base = OTHER; note = N1-methylpseudouracil
  modified_base 347: mod_base = OTHER; note = N1-methylpseudouracil
  modified_base 356: mod_base = OTHER; note = N1-methylpseudouracil
  modified_base 368: mod_base = OTHER; note = N1-methylpseudouracil
  modified_base 375: mod_base = OTHER; note = N1-methylpseudouracil
  modified_base 377: mod_base = OTHER; note = N1-methylpseudouracil
  modified_base 380: mod_base = OTHER; note = N1-methylpseudouracil
  modified_base 383: mod_base = OTHER; note = N1-methylpseudouracil
  modified_base 392: mod_base = OTHER; note = N1-methylpseudouracil
  modified_base 395: mod_base = OTHER; note = N1-methylpseudouracil
  modified_base 403: mod_base = OTHER; note = N1-methylpseudouracil
  modified_base 408: mod_base = OTHER; note = N1-methylpseudouracil
  modified_base 430: mod_base = OTHER; note = N1-methylpseudouracil
  modified_base 434: mod_base = OTHER; note = N1-methylpseudouracil
  modified_base 440: mod_base = OTHER; note = N1-methylpseudouracil
  modified_base 442: mod_base = OTHER; note = N1-methylpseudouracil
  modified_base 446: mod_base = OTHER; note = N1-methylpseudouracil
  modified_base 452: mod_base = OTHER; note = N1-methylpseudouracil
  modified_base 458: mod_base = OTHER; note = N1-methylpseudouracil
  modified_base 460: mod_base = OTHER; note = N1-methylpseudouracil
  modified_base 462: mod_base = OTHER; note = N1-methylpseudouracil
  modified_base 464: mod_base = OTHER; note = N1-methylpseudouracil
  modified_base 467: mod_base = OTHER; note = N1-methylpseudouracil
  modified_base 469: mod_base = OTHER; note = N1-methylpseudouracil
  modified_base 470: mod_base = OTHER; note = N1-methylpseudouracil
  modified_base 473: mod_base = OTHER; note = N1-methylpseudouracil
  modified_base 476: mod_base = OTHER; note = N1-methylpseudouracil
  modified_base 485: mod_base = OTHER; note = N1-methylpseudouracil
  modified_base 488: mod_base = OTHER; note = N1-methylpseudouracil
  modified_base 491: mod_base = OTHER; note = N1-methylpseudouracil
  modified_base 503: mod_base = OTHER; note = N1-methylpseudouracil
  modified_base 505: mod_base = OTHER; note = N1-methylpseudouracil
  modified_base 506: mod_base = OTHER; note = N1-methylpseudouracil
  modified_base 512: mod_base = OTHER; note = N1-methylpseudouracil
  modified_base 516: mod_base = OTHER; note = N1-methylpseudouracil
  modified_base 521: mod_base = OTHER; note = N1-methylpseudouracil
  modified_base 527: mod_base = OTHER; note = N1-methylpseudouracil
  modified_base 533: mod_base = OTHER; note = N1-methylpseudouracil
  modified_base 539: mod_base = OTHER; note = N1-methylpseudouracil
  modified_base 545: mod_base = OTHER; note = N1-methylpseudouracil
  modified_base 547: mod_base = OTHER; note = N1-methylpseudouracil
  modified_base 548: mod_base = OTHER; note = N1-methylpseudouracil
  modified_base 550: mod_base = OTHER; note = N1-methylpseudouracil
  modified_base 554: mod_base = OTHER; note = N1-methylpseudouracil
  modified_base 557: mod_base = OTHER; note = N1-methylpseudouracil
  modified_base 559: mod_base = OTHER; note = N1-methylpseudouracil
  modified_base 572: mod_base = OTHER; note = N1-methylpseudouracil
  modified_base 578: mod_base = OTHER; note = N1-methylpseudouracil
  modified_base 580: mod_base = OTHER; note = N1-methylpseudouracil
  modified_base 590: mod_base = OTHER; note = N1-methylpseudouracil
  modified_base 593: mod_base = OTHER; note = N1-methylpseudouracil
  modified_base 597: mod_base = OTHER; note = N1-methylpseudouracil
  modified_base 602: mod_base = OTHER; note = N1-methylpseudouracil
  modified_base 608: mod_base = OTHER; note = N1-methylpseudouracil
  modified_base 617: mod_base = OTHER; note = N1-methylpseudouracil
  modified_base 620: mod_base = OTHER; note = N1-methylpseudouracil
  modified_base 626: mod_base = OTHER; note = N1-methylpseudouracil
  modified_base 629: mod_base = OTHER; note = N1-methylpseudouracil
  modified_base 641: mod_base = OTHER; note = N1-methylpseudouracil
  modified_base 649: mod_base = OTHER; note = N1-methylpseudouracil
  modified_base 650: mod_base = OTHER; note = N1-methylpseudouracil
  modified_base 661: mod_base = OTHER; note = N1-methylpseudouracil
  modified_base 662: mod_base = OTHER; note = N1-methylpseudouracil
  modified_base 668: mod_base = OTHER; note = N1-methylpseudouracil
  modified_base 676: mod_base = OTHER; note = N1-methylpseudouracil
  modified_base 677: mod_base = OTHER; note = N1-methylpseudouracil
  modified_base 680: mod_base = OTHER; note = N1-methylpseudouracil
  modified_base 682: mod_base = OTHER; note = N1-methylpseudouracil
  modified_base 686: mod_base = OTHER; note = N1-methylpseudouracil
  modified_base 687: mod_base = OTHER; note = N1-methylpseudouracil
  modified_base 695: mod_base = OTHER; note = N1-methylpseudouracil
  modified_base 701: mod_base = OTHER; note = N1-methylpseudouracil
  modified_base 705: mod_base = OTHER; note = N1-methylpseudouracil
  modified_base 707: mod_base = OTHER; note = N1-methylpseudouracil
  modified_base 710: mod_base = OTHER; note = N1-methylpseudouracil
  modified_base 713: mod_base = OTHER; note = N1-methylpseudouracil
  modified_base 719: mod_base = OTHER; note = N1-methylpseudouracil
  modified_base 722: mod_base = OTHER; note = N1-methylpseudouracil
  modified_base 724: mod_base = OTHER; note = N1-methylpseudouracil
  modified_base 731: mod_base = OTHER; note = N1-methylpseudouracil
  modified_base 734: mod_base = OTHER; note = N1-methylpseudouracil
  modified_base 742: mod_base = OTHER; note = N1-methylpseudouracil
  modified_base 744: mod_base = OTHER; note = N1-methylpseudouracil
  modified_base 748: mod_base = OTHER; note = N1-methylpseudouracil
  modified_base 749: mod_base = OTHER; note = N1-methylpseudouracil
  modified_base 751: mod_base = OTHER; note = N1-methylpseudouracil
  modified_base 758: mod_base = OTHER; note = N1-methylpseudouracil
  modified_base 763: mod_base = OTHER; note = N1-methylpseudouracil
  modified_base 764: mod_base = OTHER; note = N1-methylpseudouracil
  modified_base 765: mod_base = OTHER; note = N1-methylpseudouracil
  modified_base 767: mod_base = OTHER; note = N1-methylpseudouracil
  modified_base 770: mod_base = OTHER; note = N1-methylpseudouracil
  modified_base 773: mod_base = OTHER; note = N1-methylpseudouracil
  modified_base 776: mod_base = OTHER; note = N1-methylpseudouracil
  modified_base 782: mod_base = OTHER; note = N1-methylpseudouracil
  modified_base 784: mod_base = OTHER; note = N1-methylpseudouracil
  modified_base 785: mod_base = OTHER; note = N1-methylpseudouracil
  modified_base 792: mod_base = OTHER; note = N1-methylpseudouracil
  modified_base 797: mod_base = OTHER; note = N1-methylpseudouracil
  modified_base 806: mod_base = OTHER; note = N1-methylpseudouracil
  modified_base 809: mod_base = OTHER; note = N1-methylpseudouracil
  modified_base 812: mod_base = OTHER; note = N1-methylpseudouracil
  modified_base 817: mod_base = OTHER; note = N1-methylpseudouracil
  modified_base 825: mod_base = OTHER; note = N1-methylpseudouracil
  modified_base 842: mod_base = OTHER; note = N1-methylpseudouracil
  modified_base 854: mod_base = OTHER; note = N1-methylpseudouracil
  modified_base 857: mod_base = OTHER; note = N1-methylpseudouracil
  modified_base 860: mod_base = OTHER; note = N1-methylpseudouracil
  modified_base 864: mod_base = OTHER; note = N1-methylpseudouracil
  modified_base 872: mod_base = OTHER; note = N1-methylpseudouracil
  modified_base 875: mod_base = OTHER; note = N1-methylpseudouracil
  modified_base 884: mod_base = OTHER; note = N1-methylpseudouracil
  modified_base 893: mod_base = OTHER; note = N1-methylpseudouracil
  modified_base 900: mod_base = OTHER; note = N1-methylpseudouracil
  modified_base 901: mod_base = OTHER; note = N1-methylpseudouracil
  modified_base 904: mod_base = OTHER; note = N1-methylpseudouracil
  modified_base 906: mod_base = OTHER; note = N1-methylpseudouracil
  modified_base 907: mod_base = OTHER; note = N1-methylpseudouracil
  modified_base 920: mod_base = OTHER; note = N1-methylpseudouracil
  modified_base 929: mod_base = OTHER; note = N1-methylpseudouracil
  modified_base 932: mod_base = OTHER; note = N1-methylpseudouracil
  modified_base 941: mod_base = OTHER; note = N1-methylpseudouracil
  modified_base 956: mod_base = OTHER; note = N1-methylpseudouracil
  modified_base 962: mod_base = OTHER; note = N1-methylpseudouracil
  modified_base 966: mod_base = OTHER; note = N1-methylpseudouracil
  modified_base 979: mod_base = OTHER; note = N1-methylpseudouracil
  modified_base 983: mod_base = OTHER; note = N1-methylpseudouracil
  modified_base 988: mod_base = OTHER; note = N1-methylpseudouracil
  modified_base 990: mod_base = OTHER; note = N1-methylpseudouracil
  modified_base 991: mod_base = OTHER; note = N1-methylpseudouracil
  modified_base 992: mod_base = OTHER; note = N1-methylpseudouracil
  modified_base 997: mod_base = OTHER; note = N1-methylpseudouracil
  modified_base 1006: mod_base = OTHER; note = N1-methylpseudouracil
  modified_base 1007: mod_base = OTHER; note = N1-methylpseudouracil
  modified_base 1009: mod_base = OTHER; note = N1-methylpseudouracil
  modified_base 1010: mod_base = OTHER; note = N1-methylpseudouracil
  modified_base 1012: mod_base = OTHER; note = N1-methylpseudouracil
  modified_base 1013: mod_base = OTHER; note = N1-methylpseudouracil
  modified_base 1021: mod_base = OTHER; note = N1-methylpseudouracil
  modified_base 1022: mod_base = OTHER; note = N1-methylpseudouracil
  modified_base 1024: mod_base = OTHER; note = N1-methylpseudouracil
  modified_base 1025: mod_base = OTHER; note = N1-methylpseudouracil
  modified_base 1028: mod_base = OTHER; note = N1-methylpseudouracil
  modified_base 1031: mod_base = OTHER; note = N1-methylpseudouracil
  modified_base 1033: mod_base = OTHER; note = N1-methylpseudouracil
  modified_base 1034: mod_base = OTHER; note = N1-methylpseudouracil
  modified_base 1037: mod_base = OTHER; note = N1-methylpseudouracil
  modified_base 1043: mod_base = OTHER; note = N1-methylpseudouracil
  modified_base 1046: mod_base = OTHER; note = N1-methylpseudouracil
  modified_base 1051: mod_base = OTHER; note = N1-methylpseudouracil
  modified_base 1058: mod_base = OTHER; note = N1-methylpseudouracil
  modified_base 1061: mod_base = OTHER; note = N1-methylpseudouracil
  modified_base 1070: mod_base = OTHER; note = N1-methylpseudouracil
  modified_base 1073: mod_base = OTHER; note = N1-methylpseudouracil
  modified_base 1076: mod_base = OTHER; note = N1-methylpseudouracil
  modified_base 1085: mod_base = OTHER; note = N1-methylpseudouracil
  modified_base 1087: mod_base = OTHER; note = N1-methylpseudouracil
  modified_base 1088: mod_base = OTHER; note = N1-methylpseudouracil
  modified_base 1097: mod_base = OTHER; note = N1-methylpseudouracil
  modified_base 1098: mod_base = OTHER; note = N1-methylpseudouracil
  modified_base 1102: mod_base = OTHER; note = N1-methylpseudouracil
  modified_base 1103: mod_base = OTHER; note = N1-methylpseudouracil
  modified_base 1105: mod_base = OTHER; note = N1-methylpseudouracil
  modified_base 1109: mod_base = OTHER; note = N1-methylpseudouracil
  modified_base 1112: mod_base = OTHER; note = N1-methylpseudouracil
  modified_base 1115: mod_base = OTHER; note = N1-methylpseudouracil
  modified_base 1121: mod_base = OTHER; note = N1-methylpseudouracil
  modified_base 1127: mod_base = OTHER; note = N1-methylpseudouracil
  modified_base 1138: mod_base = OTHER; note = N1-methylpseudouracil
  modified_base 1139: mod_base = OTHER; note = N1-methylpseudouracil
  modified_base 1143: mod_base = OTHER; note = N1-methylpseudouracil
  modified_base 1144: mod_base = OTHER; note = N1-methylpseudouracil
  modified_base 1151: mod_base = OTHER; note = N1-methylpseudouracil
  modified_base 1158: mod_base = OTHER; note = N1-methylpseudouracil
  modified_base 1159: mod_base = OTHER; note = N1-methylpseudouracil
  modified_base 1162: mod_base = OTHER; note = N1-methylpseudouracil
  modified_base 1172: mod_base = OTHER; note = N1-methylpseudouracil
  modified_base 1181: mod_base = OTHER; note = N1-methylpseudouracil
  modified_base 1190: mod_base = OTHER; note = N1-methylpseudouracil
  modified_base 1198: mod_base = OTHER; note = N1-methylpseudouracil
  modified_base 1199: mod_base = OTHER; note = N1-methylpseudouracil
  modified_base 1200: mod_base = OTHER; note = N1-methylpseudouracil
  modified_base 1202: mod_base = OTHER; note = N1-methylpseudouracil
  modified_base 1216: mod_base = OTHER; note = N1-methylpseudouracil
  modified_base 1218: mod_base = OTHER; note = N1-methylpseudouracil
  modified_base 1226: mod_base = OTHER; note = N1-methylpseudouracil
  modified_base 1231: mod_base = OTHER; note = N1-methylpseudouracil
  modified_base 1238: mod_base = OTHER; note = N1-methylpseudouracil
  modified_base 1253: mod_base = OTHER; note = N1-methylpseudouracil
  modified_base 1256: mod_base = OTHER; note = N1-methylpseudouracil
  modified_base 1259: mod_base = OTHER; note = N1-methylpseudouracil
  modified_base 1268: mod_base = OTHER; note = N1-methylpseudouracil
  modified_base 1276: mod_base = OTHER; note = N1-methylpseudouracil
  modified_base 1277: mod_base = OTHER; note = N1-methylpseudouracil
  modified_base 1279: mod_base = OTHER; note = N1-methylpseudouracil
  modified_base 1291: mod_base = OTHER; note = N1-methylpseudouracil
  modified_base 1292: mod_base = OTHER; note = N1-methylpseudouracil
  modified_base 1301: mod_base = OTHER; note = N1-methylpseudouracil
  modified_base 1303: mod_base = OTHER; note = N1-methylpseudouracil
  modified_base 1304: mod_base = OTHER; note = N1-methylpseudouracil
  modified_base 1326: mod_base = OTHER; note = N1-methylpseudouracil
  modified_base 1357: mod_base = OTHER; note = N1-methylpseudouracil
  modified_base 1361: mod_base = OTHER; note = N1-methylpseudouracil
  modified_base 1363: mod_base = OTHER; note = N1-methylpseudouracil
  modified_base 1364: mod_base = OTHER; note = N1-methylpseudouracil
  modified_base 1366: mod_base = OTHER; note = N1-methylpseudouracil
  modified_base 1367: mod_base = OTHER; note = N1-methylpseudouracil
  modified_base 1375: mod_base = OTHER; note = N1-methylpseudouracil
  modified_base 1376: mod_base = OTHER; note = N1-methylpseudouracil
  modified_base 1377: mod_base = OTHER; note = N1-methylpseudouracil
  modified_base 1382: mod_base = OTHER; note = N1-methylpseudouracil
  modified_base 1385: mod_base = OTHER; note = N1-methylpseudouracil
  modified_base 1395: mod_base = OTHER; note = N1-methylpseudouracil
  modified_base 1397: mod_base = OTHER; note = N1-methylpseudouracil
  modified_base 1400: mod_base = OTHER; note = N1-methylpseudouracil
  modified_base 1409: mod_base = OTHER; note = N1-methylpseudouracil
  modified_base 1414: mod_base = OTHER; note = N1-methylpseudouracil
  modified_base 1415: mod_base = OTHER; note = N1-methylpseudouracil
  modified_base 1421: mod_base = OTHER; note = N1-methylpseudouracil
  modified_base 1436: mod_base = OTHER; note = N1-methylpseudouracil
  modified_base 1439: mod_base = OTHER; note = N1-methylpseudouracil
  modified_base 1445: mod_base = OTHER; note = N1-methylpseudouracil
  modified_base 1453: mod_base = OTHER; note = N1-methylpseudouracil
  modified_base 1455: mod_base = OTHER; note = N1-methylpseudouracil
  modified_base 1478: mod_base = OTHER; note = N1-methylpseudouracil
  modified_base 1481: mod_base = OTHER; note = N1-methylpseudouracil
  modified_base 1484: mod_base = OTHER; note = N1-methylpseudouracil
  modified_base 1487: mod_base = OTHER; note = N1-methylpseudouracil
  modified_base 1490: mod_base = OTHER; note = N1-methylpseudouracil
  modified_base 1493: mod_base = OTHER; note = N1-methylpseudouracil
  modified_base 1502: mod_base = OTHER; note = N1-methylpseudouracil
  modified_base 1523: mod_base = OTHER; note = N1-methylpseudouracil
  modified_base 1541: mod_base = OTHER; note = N1-methylpseudouracil
  modified_base 1543: mod_base = OTHER; note = N1-methylpseudouracil
  modified_base 1546: mod_base = OTHER; note = N1-methylpseudouracil
  modified_base 1547: mod_base = OTHER; note = N1-methylpseudouracil
  modified_base 1549: mod_base = OTHER; note = N1-methylpseudouracil
  modified_base 1552: mod_base = OTHER; note = N1-methylpseudouracil
  modified_base 1558: mod_base = OTHER; note = N1-methylpseudouracil
  modified_base 1559: mod_base = OTHER; note = N1-methylpseudouracil
  modified_base 1561: mod_base = OTHER; note = N1-methylpseudouracil
  modified_base 1564: mod_base = OTHER; note = N1-methylpseudouracil
  modified_base 1568: mod_base = OTHER; note = N1-methylpseudouracil
  modified_base 1571: mod_base = OTHER; note = N1-methylpseudouracil
  modified_base 1583: mod_base = OTHER; note = N1-methylpseudouracil
  modified_base 1595: mod_base = OTHER; note = N1-methylpseudouracil
  modified_base 1598: mod_base = OTHER; note = N1-methylpseudouracil
  modified_base 1600: mod_base = OTHER; note = N1-methylpseudouracil
  modified_base 1601: mod_base = OTHER; note = N1-methylpseudouracil
  modified_base 1607: mod_base = OTHER; note = N1-methylpseudouracil
  modified_base 1612: mod_base = OTHER; note = N1-methylpseudouracil
  modified_base 1621: mod_base = OTHER; note = N1-methylpseudouracil
  modified_base 1627: mod_base = OTHER; note = N1-methylpseudouracil
  modified_base 1637: mod_base = OTHER; note = N1-methylpseudouracil
  modified_base 1640: mod_base = OTHER; note = N1-methylpseudouracil
  modified_base 1648: mod_base = OTHER; note = N1-methylpseudouracil
  modified_base 1655: mod_base = OTHER; note = N1-methylpseudouracil
  modified_base 1667: mod_base = OTHER; note = N1-methylpseudouracil
  modified_base 1669: mod_base = OTHER; note = N1-methylpseudouracil
  modified_base 1675: mod_base = OTHER; note = N1-methylpseudouracil
  modified_base 1676: mod_base = OTHER; note = N1-methylpseudouracil
  modified_base 1677: mod_base = OTHER; note = N1-methylpseudouracil
  modified_base 1694: mod_base = OTHER; note = N1-methylpseudouracil
  modified_base 1695: mod_base = OTHER; note = N1-methylpseudouracil
  modified_base 1697: mod_base = OTHER; note = N1-methylpseudouracil
  modified_base 1700: mod_base = OTHER; note = N1-methylpseudouracil
  modified_base 1715: mod_base = OTHER; note = N1-methylpseudouracil
  modified_base 1721: mod_base = OTHER; note = N1-methylpseudouracil
  modified_base 1723: mod_base = OTHER; note = N1-methylpseudouracil
  modified_base 1728: mod_base = OTHER; note = N1-methylpseudouracil
  modified_base 1737: mod_base = OTHER; note = N1-methylpseudouracil
  modified_base 1745: mod_base = OTHER; note = N1-methylpseudouracil
  modified_base 1747: mod_base = OTHER; note = N1-methylpseudouracil
  modified_base 1751: mod_base = OTHER; note = N1-methylpseudouracil
  modified_base 1761: mod_base = OTHER; note = N1-methylpseudouracil
  modified_base 1763: mod_base = OTHER; note = N1-methylpseudouracil
  modified_base 1765: mod_base = OTHER; note = N1-methylpseudouracil
  modified_base 1781: mod_base = OTHER; note = N1-methylpseudouracil
  modified_base 1783: mod_base = OTHER; note = N1-methylpseudouracil
  modified_base 1787: mod_base = OTHER; note = N1-methylpseudouracil
  modified_base 1790: mod_base = OTHER; note = N1-methylpseudouracil
  modified_base 1800: mod_base = OTHER; note = N1-methylpseudouracil
  modified_base 1801: mod_base = OTHER; note = N1-methylpseudouracil
  modified_base 1802: mod_base = OTHER; note = N1-methylpseudouracil
  modified_base 1803: mod_base = OTHER; note = N1-methylpseudouracil
  modified_base 1807: mod_base = OTHER; note = N1-methylpseudouracil
  modified_base 1811: mod_base = OTHER; note = N1-methylpseudouracil
  modified_base 1817: mod_base = OTHER; note = N1-methylpseudouracil
  modified_base 1820: mod_base = OTHER; note = N1-methylpseudouracil
  modified_base 1835: mod_base = OTHER; note = N1-methylpseudouracil
  modified_base 1837: mod_base = OTHER; note = N1-methylpseudouracil
  modified_base 1838: mod_base = OTHER; note = N1-methylpseudouracil
  modified_base 1843: mod_base = OTHER; note = N1-methylpseudouracil
  modified_base 1846: mod_base = OTHER; note = N1-methylpseudouracil
  modified_base 1850: mod_base = OTHER; note = N1-methylpseudouracil
  modified_base 1852: mod_base = OTHER; note = N1-methylpseudouracil
  modified_base 1854: mod_base = OTHER; note = N1-methylpseudouracil
  modified_base 1859: mod_base = OTHER; note = N1-methylpseudouracil
  modified_base 1862: mod_base = OTHER; note = N1-methylpseudouracil
  modified_base 1880: mod_base = OTHER; note = N1-methylpseudouracil
  modified_base 1883: mod_base = OTHER; note = N1-methylpseudouracil
  modified_base 1886: mod_base = OTHER; note = N1-methylpseudouracil
  modified_base 1898: mod_base = OTHER; note = N1-methylpseudouracil
  modified_base 1905: mod_base = OTHER; note = N1-methylpseudouracil
  modified_base 1907: mod_base = OTHER; note = N1-methylpseudouracil
  modified_base 1925: mod_base = OTHER; note = N1-methylpseudouracil
  modified_base 1928: mod_base = OTHER; note = N1-methylpseudouracil
  modified_base 1931: mod_base = OTHER; note = N1-methylpseudouracil
  modified_base 1934: mod_base = OTHER; note = N1-methylpseudouracil
  modified_base 1945: mod_base = OTHER; note = N1-methylpseudouracil
  modified_base 1951: mod_base = OTHER; note = N1-methylpseudouracil
  modified_base 1954: mod_base = OTHER; note = N1-methylpseudouracil
  modified_base 1955: mod_base = OTHER; note = N1-methylpseudouracil
  modified_base 1957: mod_base = OTHER; note = N1-methylpseudouracil
  modified_base 1966: mod_base = OTHER; note = N1-methylpseudouracil
  modified_base 1967: mod_base = OTHER; note = N1-methylpseudouracil
  modified_base 1976: mod_base = OTHER; note = N1-methylpseudouracil
  modified_base 1985: mod_base = OTHER; note = N1-methylpseudouracil
  modified_base 1996: mod_base = OTHER; note = N1-methylpseudouracil
  modified_base 1997: mod_base = OTHER; note = N1-methylpseudouracil
  modified_base 2002: mod_base = OTHER; note = N1-methylpseudouracil
  modified_base 2009: mod_base = OTHER; note = N1-methylpseudouracil
  modified_base 2012: mod_base = OTHER; note = N1-methylpseudouracil
  modified_base 2017: mod_base = OTHER; note = N1-methylpseudouracil
  modified_base 2022: mod_base = OTHER; note = N1-methylpseudouracil
  modified_base 2026: mod_base = OTHER; note = N1-methylpseudouracil
  modified_base 2027: mod_base = OTHER; note = N1-methylpseudouracil
  modified_base 2035: mod_base = OTHER; note = N1-methylpseudouracil
  modified_base 2036: mod_base = OTHER; note = N1-methylpseudouracil
  modified_base 2038: mod_base = OTHER; note = N1-methylpseudouracil
  modified_base 2056: mod_base = OTHER; note = N1-methylpseudouracil
  modified_base 2060: mod_base = OTHER; note = N1-methylpseudouracil
  modified_base 2061: mod_base = OTHER; note = N1-methylpseudouracil
  modified_base 2063: mod_base = OTHER; note = N1-methylpseudouracil
  modified_base 2075: mod_base = OTHER; note = N1-methylpseudouracil
  modified_base 2083: mod_base = OTHER; note = N1-methylpseudouracil
  modified_base 2084: mod_base = OTHER; note = N1-methylpseudouracil
  modified_base 2086: mod_base = OTHER; note = N1-methylpseudouracil
  modified_base 2090: mod_base = OTHER; note = N1-methylpseudouracil
  modified_base 2108: mod_base = OTHER; note = N1-methylpseudouracil
  modified_base 2113: mod_base = OTHER; note = N1-methylpseudouracil
  modified_base 2137: mod_base = OTHER; note = N1-methylpseudouracil
  modified_base 2138: mod_base = OTHER; note = N1-methylpseudouracil
  modified_base 2155: mod_base = OTHER; note = N1-methylpseudouracil
  modified_base 2156: mod_base = OTHER; note = N1-methylpseudouracil
  modified_base 2176: mod_base = OTHER; note = N1-methylpseudouracil
  modified_base 2180: mod_base = OTHER; note = N1-methylpseudouracil
  modified_base 2183: mod_base = OTHER; note = N1-methylpseudouracil
  modified_base 2192: mod_base = OTHER; note = N1-methylpseudouracil
  modified_base 2201: mod_base = OTHER; note = N1-methylpseudouracil
  modified_base 2209: mod_base = OTHER; note = N1-methylpseudouracil
  modified_base 2210: mod_base = OTHER; note = N1-methylpseudouracil
  modified_base 2216: mod_base = OTHER; note = N1-methylpseudouracil
  modified_base 2219: mod_base = OTHER; note = N1-methylpseudouracil
  modified_base 2232: mod_base = OTHER; note = N1-methylpseudouracil
  modified_base 2234: mod_base = OTHER; note = N1-methylpseudouracil
  modified_base 2240: mod_base = OTHER; note = N1-methylpseudouracil
  modified_base 2249: mod_base = OTHER; note = N1-methylpseudouracil
  modified_base 2273: mod_base = OTHER; note = N1-methylpseudouracil
  modified_base 2285: mod_base = OTHER; note = N1-methylpseudouracil
  modified_base 2287: mod_base = OTHER; note = N1-methylpseudouracil
  modified_base 2291: mod_base = OTHER; note = N1-methylpseudouracil
  modified_base 2294: mod_base = OTHER; note = N1-methylpseudouracil
  modified_base 2321: mod_base = OTHER; note = N1-methylpseudouracil
  modified_base 2324: mod_base = OTHER; note = N1-methylpseudouracil
  modified_base 2333: mod_base = OTHER; note = N1-methylpseudouracil
  modified_base 2335: mod_base = OTHER; note = N1-methylpseudouracil
  modified_base 2339: mod_base = OTHER; note = N1-methylpseudouracil
  modified_base 2342: mod_base = OTHER; note = N1-methylpseudouracil
  modified_base 2344: mod_base = OTHER; note = N1-methylpseudouracil
  modified_base 2349: mod_base = OTHER; note = N1-methylpseudouracil
  modified_base 2360: mod_base = OTHER; note = N1-methylpseudouracil
  modified_base 2384: mod_base = OTHER; note = N1-methylpseudouracil
  modified_base 2387: mod_base = OTHER; note = N1-methylpseudouracil
  modified_base 2393: mod_base = OTHER; note = N1-methylpseudouracil
  modified_base 2396: mod_base = OTHER; note = N1-methylpseudouracil
  modified_base 2408: mod_base = OTHER; note = N1-methylpseudouracil
  modified_base 2424: mod_base = OTHER; note = N1-methylpseudouracil
  modified_base 2426: mod_base = OTHER; note = N1-methylpseudouracil
  modified_base 2439: mod_base = OTHER; note = N1-methylpseudouracil
  modified_base 2459: mod_base = OTHER; note = N1-methylpseudouracil
  modified_base 2465: mod_base = OTHER; note = N1-methylpseudouracil
  modified_base 2469: mod_base = OTHER; note = N1-methylpseudouracil
  modified_base 2483: mod_base = OTHER; note = N1-methylpseudouracil
  modified_base 2492: mod_base = OTHER; note = N1-methylpseudouracil
  modified_base 2498: mod_base = OTHER; note = N1-methylpseudouracil
  modified_base 2500: mod_base = OTHER; note = N1-methylpseudouracil
  modified_base 2513: mod_base = OTHER; note = N1-methylpseudouracil
  modified_base 2531: mod_base = OTHER; note = N1-methylpseudouracil
  modified_base 2537: mod_base = OTHER; note = N1-methylpseudouracil
  modified_base 2549: mod_base = OTHER; note = N1-methylpseudouracil
  modified_base 2564: mod_base = OTHER; note = N1-methylpseudouracil
  modified_base 2572: mod_base = OTHER; note = N1-methylpseudouracil
  modified_base 2575: mod_base = OTHER; note = N1-methylpseudouracil
  modified_base 2576: mod_base = OTHER; note = N1-methylpseudouracil
  modified_base 2578: mod_base = OTHER; note = N1-methylpseudouracil
  modified_base 2579: mod_base = OTHER; note = N1-methylpseudouracil
  modified_base 2588: mod_base = OTHER; note = N1-methylpseudouracil
  modified_base 2593: mod_base = OTHER; note = N1-methylpseudouracil
  modified_base 2597: mod_base = OTHER; note = N1-methylpseudouracil
  modified_base 2606: mod_base = OTHER; note = N1-methylpseudouracil
  modified_base 2614: mod_base = OTHER; note = N1-methylpseudouracil
  modified_base 2623: mod_base = OTHER; note = N1-methylpseudouracil
  modified_base 2627: mod_base = OTHER; note = N1-methylpseudouracil
  modified_base 2632: mod_base = OTHER; note = N1-methylpseudouracil
  modified_base 2636: mod_base = OTHER; note = N1-methylpseudouracil
  modified_base 2642: mod_base = OTHER; note = N1-methylpseudouracil
  modified_base 2654: mod_base = OTHER; note = N1-methylpseudouracil
  modified_base 2657: mod_base = OTHER; note = N1-methylpseudouracil
  modified_base 2659: mod_base = OTHER; note = N1-methylpseudouracil
  modified_base 2660: mod_base = OTHER; note = N1-methylpseudouracil
  modified_base 2663: mod_base = OTHER; note = N1-methylpseudouracil
  modified_base 2666: mod_base = OTHER; note = N1-methylpseudouracil
  modified_base 2669: mod_base = OTHER; note = N1-methylpseudouracil
  modified_base 2671: mod_base = OTHER; note = N1-methylpseudouracil
  modified_base 2674: mod_base = OTHER; note = N1-methylpseudouracil
  modified_base 2678: mod_base = OTHER; note = N1-methylpseudouracil
  modified_base 2681: mod_base = OTHER; note = N1-methylpseudouracil
  modified_base 2684: mod_base = OTHER; note = N1-methylpseudouracil
  modified_base 2686: mod_base = OTHER; note = N1-methylpseudouracil
  modified_base 2687: mod_base = OTHER; note = N1-methylpseudouracil
  modified_base 2689: mod_base = OTHER; note = N1-methylpseudouracil
  modified_base 2690: mod_base = OTHER; note = N1-methylpseudouracil
  modified_base 2699: mod_base = OTHER; note = N1-methylpseudouracil
  modified_base 2707: mod_base = OTHER; note = N1-methylpseudouracil
  modified_base 2711: mod_base = OTHER; note = N1-methylpseudouracil
  modified_base 2714: mod_base = OTHER; note = N1-methylpseudouracil
  modified_base 2717: mod_base = OTHER; note = N1-methylpseudouracil
  modified_base 2720: mod_base = OTHER; note = N1-methylpseudouracil
  modified_base 2722: mod_base = OTHER; note = N1-methylpseudouracil
  modified_base 2726: mod_base = OTHER; note = N1-methylpseudouracil
  modified_base 2729: mod_base = OTHER; note = N1-methylpseudouracil
  modified_base 2736: mod_base = OTHER; note = N1-methylpseudouracil
  modified_base 2744: mod_base = OTHER; note = N1-methylpseudouracil
  modified_base 2761: mod_base = OTHER; note = N1-methylpseudouracil
  modified_base 2785: mod_base = OTHER; note = N1-methylpseudouracil
  modified_base 2792: mod_base = OTHER; note = N1-methylpseudouracil
  modified_base 2795: mod_base = OTHER; note = N1-methylpseudouracil
  modified_base 2798: mod_base = OTHER; note = N1-methylpseudouracil
  modified_base 2803: mod_base = OTHER; note = N1-methylpseudouracil
  modified_base 2815: mod_base = OTHER; note = N1-methylpseudouracil
  modified_base 2818: mod_base = OTHER; note = N1-methylpseudouracil
  modified_base 2822: mod_base = OTHER; note = N1-methylpseudouracil
  modified_base 2824: mod_base = OTHER; note = N1-methylpseudouracil
  modified_base 2825: mod_base = OTHER; note = N1-methylpseudouracil
  modified_base 2827: mod_base = OTHER; note = N1-methylpseudouracil
  modified_base 2831: mod_base = OTHER; note = N1-methylpseudouracil
  modified_base 2833: mod_base = OTHER; note = N1-methylpseudouracil
  modified_base 2837: mod_base = OTHER; note = N1-methylpseudouracil
  modified_base 2843: mod_base = OTHER; note = N1-methylpseudouracil
  modified_base 2855: mod_base = OTHER; note = N1-methylpseudouracil
  modified_base 2858: mod_base = OTHER; note = N1-methylpseudouracil
  modified_base 2864: mod_base = OTHER; note = N1-methylpseudouracil
  modified_base 2869: mod_base = OTHER; note = N1-methylpseudouracil
  modified_base 2870: mod_base = OTHER; note = N1-methylpseudouracil
  modified_base 2872: mod_base = OTHER; note = N1-methylpseudouracil
  modified_base 2873: mod_base = OTHER; note = N1-methylpseudouracil
  modified_base 2882: mod_base = OTHER; note = N1-methylpseudouracil
  modified_base 2886: mod_base = OTHER; note = N1-methylpseudouracil
  modified_base 2888: mod_base = OTHER; note = N1-methylpseudouracil
  modified_base 2891: mod_base = OTHER; note = N1-methylpseudouracil
  modified_base 2900: mod_base = OTHER; note = N1-methylpseudouracil
  modified_base 2903: mod_base = OTHER; note = N1-methylpseudouracil
  modified_base 2909: mod_base = OTHER; note = N1-methylpseudouracil
  modified_base 2918: mod_base = OTHER; note = N1-methylpseudouracil
  modified_base 2921: mod_base = OTHER; note = N1-methylpseudouracil
  modified_base 2933: mod_base = OTHER; note = N1-methylpseudouracil
  modified_base 2936: mod_base = OTHER; note = N1-methylpseudouracil
  modified_base 2945: mod_base = OTHER; note = N1-methylpseudouracil
  modified_base 2948: mod_base = OTHER; note = N1-methylpseudouracil
  modified_base 2955: mod_base = OTHER; note = N1-methylpseudouracil
  modified_base 2960: mod_base = OTHER; note = N1-methylpseudouracil
  modified_base 2962: mod_base = OTHER; note = N1-methylpseudouracil
  modified_base 2969: mod_base = OTHER; note = N1-methylpseudouracil
  modified_base 2978: mod_base = OTHER; note = N1-methylpseudouracil
  modified_base 2993: mod_base = OTHER; note = N1-methylpseudouracil
  modified_base 2996: mod_base = OTHER; note = N1-methylpseudouracil
  modified_base 3004: mod_base = OTHER; note = N1-methylpseudouracil
  modified_base 3005: mod_base = OTHER; note = N1-methylpseudouracil
  modified_base 3017: mod_base = OTHER; note = N1-methylpseudouracil
  modified_base 3023: mod_base = OTHER; note = N1-methylpseudouracil
  modified_base 3024: mod_base = OTHER; note = N1-methylpseudouracil
  modified_base 3026: mod_base = OTHER; note = N1-methylpseudouracil
  modified_base 3033: mod_base = OTHER; note = N1-methylpseudouracil
  modified_base 3035: mod_base = OTHER; note = N1-methylpseudouracil
  modified_base 3038: mod_base = OTHER; note = N1-methylpseudouracil
  modified_base 3044: mod_base = OTHER; note = N1-methylpseudouracil
  modified_base 3050: mod_base = OTHER; note = N1-methylpseudouracil
  modified_base 3052: mod_base = OTHER; note = N1-methylpseudouracil
  modified_base 3053: mod_base = OTHER; note = N1-methylpseudouracil
  modified_base 3058: mod_base = OTHER; note = N1-methylpseudouracil
  modified_base 3059: mod_base = OTHER; note = N1-methylpseudouracil
  modified_base 3062: mod_base = OTHER; note = N1-methylpseudouracil
  modified_base 3068: mod_base = OTHER; note = N1-methylpseudouracil
  modified_base 3071: mod_base = OTHER; note = N1-methylpseudouracil
  modified_base 3074: mod_base = OTHER; note = N1-methylpseudouracil
  modified_base 3077: mod_base = OTHER; note = N1-methylpseudouracil
  modified_base 3080: mod_base = OTHER; note = N1-methylpseudouracil
  modified_base 3083: mod_base = OTHER; note = N1-methylpseudouracil
  modified_base 3092: mod_base = OTHER; note = N1-methylpseudouracil
  modified_base 3098: mod_base = OTHER; note = N1-methylpseudouracil
  modified_base 3101: mod_base = OTHER; note = N1-methylpseudouracil
  modified_base 3107: mod_base = OTHER; note = N1-methylpseudouracil
  modified_base 3110: mod_base = OTHER; note = N1-methylpseudouracil
  modified_base 3118: mod_base = OTHER; note = N1-methylpseudouracil
  modified_base 3122: mod_base = OTHER; note = N1-methylpseudouracil
  modified_base 3124: mod_base = OTHER; note = N1-methylpseudouracil
  modified_base 3125: mod_base = OTHER; note = N1-methylpseudouracil
  modified_base 3128: mod_base = OTHER; note = N1-methylpseudouracil
  modified_base 3137: mod_base = OTHER; note = N1-methylpseudouracil
  modified_base 3143: mod_base = OTHER; note = N1-methylpseudouracil
  modified_base 3146: mod_base = OTHER; note = N1-methylpseudouracil
  modified_base 3149: mod_base = OTHER; note = N1-methylpseudouracil
  modified_base 3154: mod_base = OTHER; note = N1-methylpseudouracil
  modified_base 3155: mod_base = OTHER; note = N1-methylpseudouracil
  modified_base 3158: mod_base = OTHER; note = N1-methylpseudouracil
  modified_base 3161: mod_base = OTHER; note = N1-methylpseudouracil
  modified_base 3164: mod_base = OTHER; note = N1-methylpseudouracil
  modified_base 3172: mod_base = OTHER; note = N1-methylpseudouracil
  modified_base 3175: mod_base = OTHER; note = N1-methylpseudouracil
  modified_base 3176: mod_base = OTHER; note = N1-methylpseudouracil
  modified_base 3179: mod_base = OTHER; note = N1-methylpseudouracil
  modified_base 3187: mod_base = OTHER; note = N1-methylpseudouracil
  modified_base 3197: mod_base = OTHER; note = N1-methylpseudouracil
  modified_base 3206: mod_base = OTHER; note = N1-methylpseudouracil
  modified_base 3230: mod_base = OTHER; note = N1-methylpseudouracil
  modified_base 3232: mod_base = OTHER; note = N1-methylpseudouracil
  modified_base 3233: mod_base = OTHER; note = N1-methylpseudouracil
  modified_base 3242: mod_base = OTHER; note = N1-methylpseudouracil
  modified_base 3245: mod_base = OTHER; note = N1-methylpseudouracil
  modified_base 3249: mod_base = OTHER; note = N1-methylpseudouracil
  modified_base 3254: mod_base = OTHER; note = N1-methylpseudouracil
  modified_base 3263: mod_base = OTHER; note = N1-methylpseudouracil
  modified_base 3265: mod_base = OTHER; note = N1-methylpseudouracil
  modified_base 3272: mod_base = OTHER; note = N1-methylpseudouracil
  modified_base 3280: mod_base = OTHER; note = N1-methylpseudouracil
  modified_base 3281: mod_base = OTHER; note = N1-methylpseudouracil
  modified_base 3295: mod_base = OTHER; note = N1-methylpseudouracil
  modified_base 3298: mod_base = OTHER; note = N1-methylpseudouracil
  modified_base 3299: mod_base = OTHER; note = N1-methylpseudouracil
  modified_base 3308: mod_base = OTHER; note = N1-methylpseudouracil
  modified_base 3310: mod_base = OTHER; note = N1-methylpseudouracil
  modified_base 3311: mod_base = OTHER; note = N1-methylpseudouracil
  modified_base 3321: mod_base = OTHER; note = N1-methylpseudouracil
  modified_base 3323: mod_base = OTHER; note = N1-methylpseudouracil
  modified_base 3329: mod_base = OTHER; note = N1-methylpseudouracil
  modified_base 3343: mod_base = OTHER; note = N1-methylpseudouracil
  modified_base 3346: mod_base = OTHER; note = N1-methylpseudouracil
  modified_base 3347: mod_base = OTHER; note = N1-methylpseudouracil
  modified_base 3350: mod_base = OTHER; note = N1-methylpseudouracil
  modified_base 3352: mod_base = OTHER; note = N1-methylpseudouracil
  modified_base 3356: mod_base = OTHER; note = N1-methylpseudouracil
  modified_base 3365: mod_base = OTHER; note = N1-methylpseudouracil
  modified_base 3370: mod_base = OTHER; note = N1-methylpseudouracil
  modified_base 3373: mod_base = OTHER; note = N1-methylpseudouracil
  modified_base 3374: mod_base = OTHER; note = N1-methylpseudouracil
  modified_base 3380: mod_base = OTHER; note = N1-methylpseudouracil
  modified_base 3386: mod_base = OTHER; note = N1-methylpseudouracil
  modified_base 3392: mod_base = OTHER; note = N1-methylpseudouracil
  modified_base 3395: mod_base = OTHER; note = N1-methylpseudouracil
  modified_base 3397: mod_base = OTHER; note = N1-methylpseudouracil
  modified_base 3398: mod_base = OTHER; note = N1-methylpseudouracil
  modified_base 3401: mod_base = OTHER; note = N1-methylpseudouracil
  modified_base 3404: mod_base = OTHER; note = N1-methylpseudouracil
  modified_base 3406: mod_base = OTHER; note = N1-methylpseudouracil
  modified_base 3407: mod_base = OTHER; note = N1-methylpseudouracil
  modified_base 3409: mod_base = OTHER; note = N1-methylpseudouracil
  modified_base 3410: mod_base = OTHER; note = N1-methylpseudouracil
  modified_base 3413: mod_base = OTHER; note = N1-methylpseudouracil
  modified_base 3419: mod_base = OTHER; note = N1-methylpseudouracil
  modified_base 3424: mod_base = OTHER; note = N1-methylpseudouracil
  modified_base 3425: mod_base = OTHER; note = N1-methylpseudouracil
  modified_base 3428: mod_base = OTHER; note = N1-methylpseudouracil
  modified_base 3430: mod_base = OTHER; note = N1-methylpseudouracil
  modified_base 3434: mod_base = OTHER; note = N1-methylpseudouracil
  modified_base 3437: mod_base = OTHER; note = N1-methylpseudouracil
  modified_base 3464: mod_base = OTHER; note = N1-methylpseudouracil
  modified_base 3470: mod_base = OTHER; note = N1-methylpseudouracil
  modified_base 3473: mod_base = OTHER; note = N1-methylpseudouracil
  modified_base 3476: mod_base = OTHER; note = N1-methylpseudouracil
  modified_base 3482: mod_base = OTHER; note = N1-methylpseudouracil
  modified_base 3488: mod_base = OTHER; note = N1-methylpseudouracil
  modified_base 3492: mod_base = OTHER; note = N1-methylpseudouracil
  modified_base 3494: mod_base = OTHER; note = N1-methylpseudouracil
  modified_base 3497: mod_base = OTHER; note = N1-methylpseudouracil
  modified_base 3506: mod_base = OTHER; note = N1-methylpseudouracil
  modified_base 3511: mod_base = OTHER; note = N1-methylpseudouracil
  modified_base 3518: mod_base = OTHER; note = N1-methylpseudouracil
  modified_base 3530: mod_base = OTHER; note = N1-methylpseudouracil
  modified_base 3536: mod_base = OTHER; note = N1-methylpseudouracil
  modified_base 3545: mod_base = OTHER; note = N1-methylpseudouracil
  modified_base 3548: mod_base = OTHER; note = N1-methylpseudouracil
  modified_base 3553: mod_base = OTHER; note = N1-methylpseudouracil
  modified_base 3557: mod_base = OTHER; note = N1-methylpseudouracil
  modified_base 3559: mod_base = OTHER; note = N1-methylpseudouracil
  modified_base 3566: mod_base = OTHER; note = N1-methylpseudouracil
  modified_base 3568: mod_base = OTHER; note = N1-methylpseudouracil
  modified_base 3569: mod_base = OTHER; note = N1-methylpseudouracil
  modified_base 3574: mod_base = OTHER; note = N1-methylpseudouracil
  modified_base 3575: mod_base = OTHER; note = N1-methylpseudouracil
  modified_base 3578: mod_base = OTHER; note = N1-methylpseudouracil
  modified_base 3584: mod_base = OTHER; note = N1-methylpseudouracil
  modified_base 3622: mod_base = OTHER; note = N1-methylpseudouracil
  modified_base 3638: mod_base = OTHER; note = N1-methylpseudouracil
  modified_base 3647: mod_base = OTHER; note = N1-methylpseudouracil
  modified_base 3650: mod_base = OTHER; note = N1-methylpseudouracil
  modified_base 3653: mod_base = OTHER; note = N1-methylpseudouracil
  modified_base 3654: mod_base = OTHER; note = N1-methylpseudouracil
  modified_base 3656: mod_base = OTHER; note = N1-methylpseudouracil
  modified_base 3671: mod_base = OTHER; note = N1-methylpseudouracil
  modified_base 3686: mod_base = OTHER; note = N1-methylpseudouracil
  modified_base 3688: mod_base = OTHER; note = N1-methylpseudouracil
  modified_base 3693: mod_base = OTHER; note = N1-methylpseudouracil
  modified_base 3694: mod_base = OTHER; note = N1-methylpseudouracil
  modified_base 3707: mod_base = OTHER; note = N1-methylpseudouracil
  modified_base 3713: mod_base = OTHER; note = N1-methylpseudouracil
  modified_base 3722: mod_base = OTHER; note = N1-methylpseudouracil
  modified_base 3733: mod_base = OTHER; note = N1-methylpseudouracil
  modified_base 3755: mod_base = OTHER; note = N1-methylpseudouracil
  modified_base 3758: mod_base = OTHER; note = N1-methylpseudouracil
  modified_base 3767: mod_base = OTHER; note = N1-methylpseudouracil
  modified_base 3772: mod_base = OTHER; note = N1-methylpseudouracil
  modified_base 3773: mod_base = OTHER; note = N1-methylpseudouracil
  modified_base 3775: mod_base = OTHER; note = N1-methylpseudouracil
  modified_base 3779: mod_base = OTHER; note = N1-methylpseudouracil
  modified_base 3780: mod_base = OTHER; note = N1-methylpseudouracil
  modified_base 3786: mod_base = OTHER; note = N1-methylpseudouracil
  modified_base 3797: mod_base = OTHER; note = N1-methylpseudouracil
  modified_base 3803: mod_base = OTHER; note = N1-methylpseudouracil
  modified_base 3805: mod_base = OTHER; note = N1-methylpseudouracil
  modified_base 3806: mod_base = OTHER; note = N1-methylpseudouracil
  modified_base 3822: mod_base = OTHER; note = N1-methylpseudouracil
  modified_base 3836: mod_base = OTHER; note = N1-methylpseudouracil
  modified_base 3839: mod_base = OTHER; note = N1-methylpseudouracil
  modified_base 3841: mod_base = OTHER; note = N1-methylpseudouracil
  modified_base 3847: mod_base = OTHER; note = N1-methylpseudouracil
  modified_base 3848: mod_base = OTHER; note = N1-methylpseudouracil
  modified_base 3851: mod_base = OTHER; note = N1-methylpseudouracil
  modified_base 3857: mod_base = OTHER; note = N1-methylpseudouracil
  modified_base 3860: mod_base = OTHER; note = N1-methylpseudouracil
  modified_base 3878: mod_base = OTHER; note = N1-methylpseudouracil
  modified_base 3884: mod_base = OTHER; note = N1-methylpseudouracil
  modified_base 3893: mod_base = OTHER; note = N1-methylpseudouracil
  modified_base 3898: mod_base = OTHER; note = N1-methylpseudouracil
  modified_base 3908: mod_base = OTHER; note = N1-methylpseudouracil
  modified_base 3914: mod_base = OTHER; note = N1-methylpseudouracil
  modified_base 3922: mod_base = OTHER; note = N1-methylpseudouracil
  modified_base 3934: mod_base = OTHER; note = N1-methylpseudouracil
  modified_base 3935: mod_base = OTHER; note = N1-methylpseudouracil
  modified_base 3941: mod_base = OTHER; note = N1-methylpseudouracil
  modified_base 3944: mod_base = OTHER; note = N1-methylpseudouracil
  modified_base 3956: mod_base = OTHER; note = N1-methylpseudouracil
  modified_base 3958: mod_base = OTHER; note = N1-methylpseudouracil
  modified_base 3959: mod_base = OTHER; note = N1-methylpseudouracil
  modified_base 3960: mod_base = OTHER; note = N1-methylpseudouracil
  modified_base 3962: mod_base = OTHER; note = N1-methylpseudouracil
  modified_base 3963: mod_base = OTHER; note = N1-methylpseudouracil
  modified_base 3964: mod_base = OTHER; note = N1-methylpseudouracil
  modified_base 3965: mod_base = OTHER; note = N1-methylpseudouracil
  modified_base 3967: mod_base = OTHER; note = N1-methylpseudouracil
  modified_base 3969: mod_base = OTHER; note = N1-methylpseudouracil
  modified_base 3976: mod_base = OTHER; note = N1-methylpseudouracil
  modified_base 3977: mod_base = OTHER; note = N1-methylpseudouracil
  modified_base 3978: mod_base = OTHER; note = N1-methylpseudouracil
  modified_base 3989: mod_base = OTHER; note = N1-methylpseudouracil
  modified_base 3997: mod_base = OTHER; note = N1-methylpseudouracil
  modified_base 4006: mod_base = OTHER; note = N1-methylpseudouracil
  modified_base 4009: mod_base = OTHER; note = N1-methylpseudouracil
  modified_base 4022: mod_base = OTHER; note = N1-methylpseudouracil
  modified_base 4024: mod_base = OTHER; note = N1-methylpseudouracil
  modified_base 4031: mod_base = OTHER; note = N1-methylpseudouracil
  modified_base 4043: mod_base = OTHER; note = N1-methylpseudouracil
  modified_base 4049: mod_base = OTHER; note = N1-methylpseudouracil
  modified_base 4054: mod_base = OTHER; note = N1-methylpseudouracil
  modified_base 4058: mod_base = OTHER; note = N1-methylpseudouracil
  modified_base 4061: mod_base = OTHER; note = N1-methylpseudouracil
  modified_base 4069: mod_base = OTHER; note = N1-methylpseudouracil
  modified_base 4070: mod_base = OTHER; note = N1-methylpseudouracil
  modified_base 4082: mod_base = OTHER; note = N1-methylpseudouracil
  modified_base 4087: mod_base = OTHER; note = N1-methylpseudouracil
  modified_base 4088: mod_base = OTHER; note = N1-methylpseudouracil
  modified_base 4091: mod_base = OTHER; note = N1-methylpseudouracil
  modified_base 4094: mod_base = OTHER; note = N1-methylpseudouracil
  modified_base 4097: mod_base = OTHER; note = N1-methylpseudouracil
  modified_base 4108: mod_base = OTHER; note = N1-methylpseudouracil
  modified_base 4112: mod_base = OTHER; note = N1-methylpseudouracil
  modified_base 4115: mod_base = OTHER; note = N1-methylpseudouracil
  modified_base 4136: mod_base = OTHER; note = N1-methylpseudouracil
  modified_base 4139: mod_base = OTHER; note = N1-methylpseudouracil
  modified_base 4141: mod_base = OTHER; note = N1-methylpseudouracil
  modified_base 4145: mod_base = OTHER; note = N1-methylpseudouracil
  modified_base 4157: mod_base = OTHER; note = N1-methylpseudouracil
  modified_base 4160: mod_base = OTHER; note = N1-methylpseudouracil
  modified_base 4175: mod_base = OTHER; note = N1-methylpseudouracil
  modified_base 4178: mod_base = OTHER; note = N1-methylpseudouracil
  modified_base 4181: mod_base = OTHER; note = N1-methylpseudouracil
  modified_base 4184: mod_base = OTHER; note = N1-methylpseudouracil
  modified_base 4195: mod_base = OTHER; note = N1-methylpseudouracil
  modified_base 4205: mod_base = OTHER; note = N1-methylpseudouracil
  modified_base 4209: mod_base = OTHER; note = N1-methylpseudouracil
  modified_base 4214: mod_base = OTHER; note = N1-methylpseudouracil
  modified_base 4219: mod_base = OTHER; note = N1-methylpseudouracil
  modified_base 4226: mod_base = OTHER; note = N1-methylpseudouracil
  modified_base 4229: mod_base = OTHER; note = N1-methylpseudouracil
  modified_base 4241: mod_base = OTHER; note = N1-methylpseudouracil
  modified_base 4252: mod_base = OTHER; note = N1-methylpseudouracil
  modified_base 4253: mod_base = OTHER; note = N1-methylpseudouracil
  modified_base 4261: mod_base = OTHER; note = N1-methylpseudouracil
  modified_base 4268: mod_base = OTHER; note = N1-methylpseudouracil
  modified_base 4271: mod_base = OTHER; note = N1-methylpseudouracil
  modified_base 4274: mod_base = OTHER; note = N1-methylpseudouracil
  modified_base 4276: mod_base = OTHER; note = N1-methylpseudouracil
  modified_base 4289: mod_base = OTHER; note = N1-methylpseudouracil
  modified_base 4296: mod_base = OTHER; note = N1-methylpseudouracil
  modified_base 4298: mod_base = OTHER; note = N1-methylpseudouracil
  modified_base 4301: mod_base = OTHER; note = N1-methylpseudouracil
  modified_base 4306: mod_base = OTHER; note = N1-methylpseudouracil
  modified_base 4315: mod_base = OTHER; note = N1-methylpseudouracil
  modified_base 4316: mod_base = OTHER; note = N1-methylpseudouracil
  modified_base 4319: mod_base = OTHER; note = N1-methylpseudouracil
  modified_base 4322: mod_base = OTHER; note = N1-methylpseudouracil
  modified_base 4325: mod_base = OTHER; note = N1-methylpseudouracil
  modified_base 4340: mod_base = OTHER; note = N1-methylpseudouracil
  modified_base 4348: mod_base = OTHER; note = N1-methylpseudouracil
  modified_base 4354: mod_base = OTHER; note = N1-methylpseudouracil
  modified_base 4358: mod_base = OTHER; note = N1-methylpseudouracil
  modified_base 4367: mod_base = OTHER; note = N1-methylpseudouracil
  modified_base 4370: mod_base = OTHER; note = N1-methylpseudouracil
  modified_base 4385: mod_base = OTHER; note = N1-methylpseudouracil
  modified_base 4387: mod_base = OTHER; note = N1-methylpseudouracil
  modified_base 4388: mod_base = OTHER; note = N1-methylpseudouracil
  modified_base 4398: mod_base = OTHER; note = N1-methylpseudouracil
  modified_base 4400: mod_base = OTHER; note = N1-methylpseudouracil
  modified_base 4402: mod_base = OTHER; note = N1-methylpseudouracil
  modified_base 4404: mod_base = OTHER; note = N1-methylpseudouracil
  modified_base 4413: mod_base = OTHER; note = N1-methylpseudouracil
  modified_base 4418: mod_base = OTHER; note = N1-methylpseudouracil
  modified_base 4424: mod_base = OTHER; note = N1-methylpseudouracil
  modified_base 4426: mod_base = OTHER; note = N1-methylpseudouracil
  modified_base 4427: mod_base = OTHER; note = N1-methylpseudouracil
  modified_base 4431: mod_base = OTHER; note = N1-methylpseudouracil
  modified_base 4450: mod_base = OTHER; note = N1-methylpseudouracil
  modified_base 4456: mod_base = OTHER; note = N1-methylpseudouracil
  modified_base 4458: mod_base = OTHER; note = N1-methylpseudouracil
  modified_base 4469: mod_base = OTHER; note = N1-methylpseudouracil
  modified_base 4478: mod_base = OTHER; note = N1-methylpseudouracil
  modified_base 4502: mod_base = OTHER; note = N1-methylpseudouracil
  modified_base 4509: mod_base = OTHER; note = N1-methylpseudouracil
  modified_base 4517: mod_base = OTHER; note = N1-methylpseudouracil
  modified_base 4519: mod_base = OTHER; note = N1-methylpseudouracil
  modified_base 4525: mod_base = OTHER; note = N1-methylpseudouracil
  modified_base 4537: mod_base = OTHER; note = N1-methylpseudouracil
  modified_base 4541: mod_base = OTHER; note = N1-methylpseudouracil
  modified_base 4546: mod_base = OTHER; note = N1-methylpseudouracil
  modified_base 4550: mod_base = OTHER; note = N1-methylpseudouracil
  modified_base 4551: mod_base = OTHER; note = N1-methylpseudouracil
  modified_base 4553: mod_base = OTHER; note = N1-methylpseudouracil
  modified_base 4554: mod_base = OTHER; note = N1-methylpseudouracil
  modified_base 4560: mod_base = OTHER; note = N1-methylpseudouracil
  modified_base 4561: mod_base = OTHER; note = N1-methylpseudouracil
  modified_base 4567: mod_base = OTHER; note = N1-methylpseudouracil
  modified_base 4580: mod_base = OTHER; note = N1-methylpseudouracil
  modified_base 4583: mod_base = OTHER; note = N1-methylpseudouracil
  modified_base 4588: mod_base = OTHER; note = N1-methylpseudouracil
  modified_base 4589: mod_base = OTHER; note = N1-methylpseudouracil
  modified_base 4592: mod_base = OTHER; note = N1-methylpseudouracil
  modified_base 4600: mod_base = OTHER; note = N1-methylpseudouracil
  modified_base 4608: mod_base = OTHER; note = N1-methylpseudouracil
  modified_base 4611: mod_base = OTHER; note = N1-methylpseudouracil
  modified_base 4613: mod_base = OTHER; note = N1-methylpseudouracil
  modified_base 4614: mod_base = OTHER; note = N1-methylpseudouracil
  modified_base 4615: mod_base = OTHER; note = N1-methylpseudouracil
  modified_base 4619: mod_base = OTHER; note = N1-methylpseudouracil
  modified_base 4624: mod_base = OTHER; note = N1-methylpseudouracil
  modified_base 4626: mod_base = OTHER; note = N1-methylpseudouracil
  modified_base 4630: mod_base = OTHER; note = N1-methylpseudouracil
ggaggaaatcgcaaaatttgctcttcgcgttagatttcttttagttttctcgcaactagcaagctttttgttctcgccatgcagcggagccctctggagaaggccagcgtggtgagcaagctgttcttcagctggaccaggcccatcctgcgaaagggctacagacagaggctggagctgtccgacatctaccagattccatccgtggacagcgccgacaatctgagcgagaagctggagagggagtgggaccgcgagctggccagcaagaagaaccctaagctgatcaacgccctgcgccgctgcttcttctggaggttcatgttctacggcatcttcctgtacctgggcgaggtgaccaaggccgtccagcctctgctgctgggccgcatcatcgccagctacgatcccgacaacaaggaggaacgctccatcgccatctacctgggcatcggcctgtgtctgctgttcatcgtgcggaccctgctgctgcaccccgccatcttcggcctgcatcacatcggcatgcagatgaggatcgccatgttctccctgatctacaagaagaccctgaagctgtccagccgcgtgctggataagatcagcatcgggcagctggtgagcctgctgagcaacaacctgaacaagttcgacgaggggttggcgctggcccacttcgtgtggattgccccgctgcaggtggctctgctgatggggctgatctgggagctgctgcaggcctctgccttctgcgggctggggtttctgatcgtgctggccctgttccaagctggcctgggccgcatgatgatgaagtaccgcgatcagagggccggcaagatcagcgagcgcctggtgatcactagcgagatgatagagaacatccagagcgtgaaggcttactgttgggaggaggccatggagaagatgatcgagaacctgaggcagaccgagctgaagctgactagaaaggcagcctacgtgaggtatttcaactccagcgccttcttcttcagcggcttcttcgtggtgttcctgagcgtgctgccctacgccctgatcaagggcatcatcctgaggaagatcttcaccaccattagcttctgcatcgtgctgcgcatggccgtgaccaggcagttcccttgggccgtgcagacttggtacgacagcctgggagccatcaacaagatccaggactttctgcagaagcaggaatataagaccctggagtacaacctgaccaccaccgaggtggtgatggagaacgtgaccgccttctgggaggagggcttcggcgagctgttcgagaaggccaagcagaacaataacaaccgcaagaccagcaacggcgacgactccctcttcttcagcaactttagcctgctgggcacccctgtgctgaaggacatcaacttcaagatcgaaagaggccaactgctggccgtggccggatctaccggcgccggcaagaccagcctgctgatgatgatcatgggcgagctggagcccagcgagggcaagatcaagcacagcggccggatctccttctgctcccagttctcctggatcatgcccggcaccatcaaggagaacatcatcttcggcgtgagctacgacgagtacaggtaccggagcgtgatcaaggcctgccagctggaggaggacatctccaaatttgccgagaaggacaacattgtgctgggcgaaggcgggatcaccctgtccggtggccagcgtgcacgcatctccctggcccgggctgtgtacaaggacgccgacctgtacctgctggacagcccttttggctacctggacgtgctgaccgagaaggagatcttcgagtcctgcgtgtgtaagctgatggccaacaagaccagaatcctggtgaccagcaagatggagcatctgaagaaggccgacaagatcctgatcctgcacgaggggtccagctacttctacggcaccttcagcgagctgcagaacctgcagcccgacttcagctccaagctgatgggctgcgatagcttcgaccagttctccgccgagagaaggaactccattctgaccgagaccctgcaccgattctccctggagggagacgccccagtgagctggaccgagaccaagaagcagagcttcaagcagaccggcgagttcggagagaagcgcaagaactccatcctcaaccccatcaacagcatccggaagttcagcatcgtgcagaagacccctctgcagatgaacgggatcgaggaggacagcgacgagcccctggaacggcgactgtccctcgtgcccgacagcgagcagggcgaggccatcctgccccggatctccgtgatctccactgggcccaccctgcaagcccgacggcggcaaagcgtgctgaacctgatgacccacagcgtgaaccagggccagaatatccaccgcaagactacagccagcacccgcaaggtgagcctggctccccaggccaacctgaccgagctggacatctacagcaggaggctgagccaggagacaggcctggagatcagcgaggagatcaacgaggaggacctgaaggagtgcttcttcgacgacatggagtccatccccgccgtgaccacctggaacacctacctgagatacatcaccgtgcacaagagcctgatcttcgtgctgatctggtgcctggtgatcttcttggccgaggtagccgcctcactggtggtgctgtggctgctgggcaataccccactgcaggacaaggggaactccacccacagccggaacaacagctacgccgtgatcatcacctccaccagcagctactacgtgttctacatctacgtgggcgtggccgacacactgctggccatgggcttcttcagaggcctccctctggtgcacacactgatcaccgtgagcaagatcctgcaccacaagatgctgcacagcgtgctgcaggctcccatgtcaaccctgaacaccctgaaggccggcggcatcctgaacaggttcagcaaggacatcgccattctggacgatctgctgcccctgaccatcttcgacttcatccagctgctgctgatcgtgatcggggccatcgccgtggtggccgtgctgcagccctacatcttcgtggccacagtgcccgtgatcgtggccttcatcatgctgcgcgcctacttcctgcagacctcccagcagctgaagcagctggagagcgaaggccgcagccccatcttcacccacctggtgactagcctgaaggggctgtggaccctgcgcgccttcggcaggcagccctacttcgagaccctgttccacaaggctctgaacctgcacaccgccaactggttcctgtacctcagcaccctgcgctggttccagatgcggatcgagatgatcttcgtgatcttcttcatcgccgtgaccttcatctccatcctgaccaccggggaaggcgagggacgggtgggaatcatcctgaccctggccatgaatatcatgagcaccctgcagtgggccgtgaacagcagcatcgacgtggacagcctgatgcggtccgtgtcccgggtgttcaagttcatcgacatgcccaccgagggcaagcccaccaagagcaccaagccctacaagaacggccagctgagcaaggtgatgattatcgagaacagccacgtgaagaaggacgacatctggccttccggcggccagatgaccgtgaaggacctgaccgccaagtacaccgagggcggcaacgccatcctggagaacatcagcttctccattagccctggacagcgggtgggcctgttgggacggaccggcagtgggaagagcaccctgctgtccgccttcctgcggctgctgaacacggagggcgagatccagatcgacggggtgagctgggacagcatcaccctgcagcagtggcgaaaggccttcggcgtgatcccacagaaggtgtttattttctctggcacctttaggaagaacctggacccctacgagcagtggtccgaccaggagatctggaaggtggccgacgaggtgggcctgcggtcagtgatcgagcagttccccggcaagctggacttcgtgctggtggacggcggctgcgtgctgagccacggccacaagcagctgatgtgcctggcacgcagcgtgctgagcaaggccaagatcctgctgctggacgagccctccgcgcacctggatcccgtgacctaccagatcatcaggcggaccctgaagcaggccttcgccgactgcaccgtgatcctgtgcgagagcagaatcgaggctatgctggagtgccagcagttcctggtgatcgaggagaacaaggtgcggcagtacgactccatccagaagctgctgaacgagcgcagcctgttcagacaggctatctctcccagcgatcgcgtgaagctgttccctcacaggaacagcagcaagtgcaagtctaagccacagatcgccgccctgaaggaggagaccgaggaggaggtgcaggatacccgcctgtaaagctccccgggggcctcggtggcctagcttcttgccccttgggcctccccccagcccctcctccccttcctgcacccgtacccccgtggtctttgaataaagtctgagtgggcggcaaaaaaaaaaaaaaaaaaaaaaaaaaaaaaaaaaaaaaaaaaaaaaaaaaaaaaaaaaaaaaaaaaaaaaaaaaaaaaaaaaaaaaaaaaaaaaaaaaaa

SEQ ID NO: 18 - RNA, 4641 nt, synthetic construct
  source 1..4641: mol_type = other RNA
  modified_base 1: mod_base = OTHER; note = 7-Methylguanosine with triphosphate linkage
  modified_base 2: mod_base = OTHER; note = 2'-O-methyl modified nucleotide
  modified_base 9: mod_base = OTHER; note = N1-methylpseudouracil
  modified_base 17: mod_base = OTHER; note = N1-methylpseudouracil
  modified_base 18: mod_base = OTHER; note = N1-methylpseudouracil
  modified_base 19: mod_base = OTHER; note = N1-methylpseudouracil
  modified_base 22: mod_base = OTHER; note = N1-methylpseudouracil
  modified_base 24: mod_base = OTHER; note = N1-methylpseudouracil
  modified_base 25: mod_base = OTHER; note = N1-methylpseudouracil
  modified_base 30: mod_base = OTHER; note = N1-methylpseudouracil
  modified_base 31: mod_base = OTHER; note = N1-methylpseudouracil
  modified_base 35: mod_base = OTHER; note = N1-methylpseudouracil
  modified_base 36: mod_base = OTHER; note = N1-methylpseudouracil
  modified_base 37: mod_base = OTHER; note = N1-methylpseudouracil
  modified_base 39: mod_base = OTHER; note = N1-methylpseudouracil
  modified_base 40: mod_base = OTHER; note = N1-methylpseudouracil
  modified_base 41: mod_base = OTHER; note = N1-methylpseudouracil
  modified_base 42: mod_base = OTHER; note = N1-methylpseudouracil
  modified_base 45: mod_base = OTHER; note = N1-methylpseudouracil
  modified_base 46: mod_base = OTHER; note = N1-methylpseudouracil
  modified_base 47: mod_base = OTHER; note = N1-methylpseudouracil
  modified_base 48: mod_base = OTHER; note = N1-methylpseudouracil
  modified_base 50: mod_base = OTHER; note = N1-methylpseudouracil
  modified_base 57: mod_base = OTHER; note = N1-methylpseudouracil
  modified_base 65: mod_base = OTHER; note = N1-methylpseudouracil
  modified_base 66: mod_base = OTHER; note = N1-methylpseudouracil
  modified_base 67: mod_base = OTHER; note = N1-methylpseudouracil
  modified_base 68: mod_base = OTHER; note = N1-methylpseudouracil
  modified_base 69: mod_base = OTHER; note = N1-methylpseudouracil
  modified_base 71: mod_base = OTHER; note = N1-methylpseudouracil
  modified_base 72: mod_base = OTHER; note = N1-methylpseudouracil
  modified_base 74: mod_base = OTHER; note = N1-methylpseudouracil
  modified_base 80: mod_base = OTHER; note = N1-methylpseudouracil
  modified_base 93: mod_base = OTHER; note = N1-methylpseudouracil
  modified_base 95: mod_base = OTHER; note = N1-methylpseudouracil
  modified_base 110: mod_base = OTHER; note = N1-methylpseudouracil
  modified_base 113: mod_base = OTHER; note = N1-methylpseudouracil
  modified_base 122: mod_base = OTHER; note = N1-methylpseudouracil
  modified_base 124: mod_base = OTHER; note = N1-methylpseudouracil
  modified_base 125: mod_base = OTHER; note = N1-methylpseudouracil
  modified_base 127: mod_base = OTHER; note = N1-methylpseudouracil
  modified_base 128: mod_base = OTHER; note = N1-methylpseudouracil
  modified_base 133: mod_base = OTHER; note = N1-methylpseudouracil
  modified_base 146: mod_base = OTHER; note = N1-methylpseudouracil
  modified_base 149: mod_base = OTHER; note = N1-methylpseudouracil
  modified_base 160: mod_base = OTHER; note = N1-methylpseudouracil
  modified_base 173: mod_base = OTHER; note = N1-methylpseudouracil
  modified_base 179: mod_base = OTHER; note = N1-methylpseudouracil
  modified_base 181: mod_base = OTHER; note = N1-methylpseudouracil
  modified_base 188: mod_base = OTHER; note = N1-methylpseudouracil
  modified_base 190: mod_base = OTHER; note = N1-methylpseudouracil
  modified_base 197: mod_base = OTHER; note = N1-methylpseudouracil
  modified_base 198: mod_base = OTHER; note = N1-methylpseudouracil
  modified_base 202: mod_base = OTHER; note = N1-methylpseudouracil
  modified_base 206: mod_base = OTHER; note = N1-methylpseudouracil
  modified_base 222: mod_base = OTHER; note = N1-methylpseudouracil
  modified_base 224: mod_base = OTHER; note = N1-methylpseudouracil
  modified_base 236: mod_base = OTHER; note = N1-methylpseudouracil
  modified_base 247: mod_base = OTHER; note = N1-methylpseudouracil
  modified_base 260: mod_base = OTHER; note = N1-methylpseudouracil
  modified_base 279: mod_base = OTHER; note = N1-methylpseudouracil
  modified_base 284: mod_base = OTHER; note = N1-methylpseudouracil
  modified_base 287: mod_base = OTHER; note = N1-methylpseudouracil
  modified_base 296: mod_base = OTHER; note = N1-methylpseudouracil
  modified_base 304: mod_base = OTHER; note = N1-methylpseudouracil
  modified_base 307: mod_base = OTHER; note = N1-methylpseudouracil
  modified_base 308: mod_base = OTHER; note = N1-methylpseudouracil
  modified_base 310: mod_base = OTHER; note = N1-methylpseudouracil
  modified_base 311: mod_base = OTHER; note = N1-methylpseudouracil
  modified_base 313: mod_base = OTHER; note = N1-methylpseudouracil
  modified_base 319: mod_base = OTHER; note = N1-methylpseudouracil
  modified_base 320: mod_base = OTHER; note = N1-methylpseudouracil
  modified_base 323: mod_base = OTHER; note = N1-methylpseudouracil
  modified_base 325: mod_base = OTHER; note = N1-methylpseudouracil
  modified_base 326: mod_base = OTHER; note = N1-methylpseudouracil
  modified_base 328: mod_base = OTHER; note = N1-methylpseudouracil
  modified_base 335: mod_base = OTHER; note = N1-methylpseudouracil
  modified_base 337: mod_base = OTHER; note = N1-methylpseudouracil
  modified_base 338: mod_base = OTHER; note = N1-methylpseudouracil
  modified_base 341: mod_base = OTHER; note = N1-methylpseudouracil
  modified_base 343: mod_base = OTHER; note = N1-methylpseudouracil
  modified_base 347: mod_base = OTHER; note = N1-methylpseudouracil
  modified_base 356: mod_base = OTHER; note = N1-methylpseudouracil
  modified_base 368: mod_base = OTHER; note = N1-methylpseudouracil
  modified_base 375: mod_base = OTHER; note = N1-methylpseudouracil
  modified_base 377: mod_base = OTHER; note = N1-methylpseudouracil
  modified_base 380: mod_base = OTHER; note = N1-methylpseudouracil
  modified_base 383: mod_base = OTHER; note = N1-methylpseudouracil
  modified_base 392: mod_base = OTHER; note = N1-methylpseudouracil
  modified_base 395: mod_base = OTHER; note = N1-methylpseudouracil
  modified_base 403: mod_base = OTHER; note = N1-methylpseudouracil
  modified_base 408: mod_base = OTHER; note = N1-methylpseudouracil
  modified_base 430: mod_base = OTHER; note = N1-methylpseudouracil
  modified_base 434: mod_base = OTHER; note = N1-methylpseudouracil
  modified_base 440: mod_base = OTHER; note = N1-methylpseudouracil
  modified_base 442: mod_base = OTHER; note = N1-methylpseudouracil
  modified_base 446: mod_base = OTHER; note = N1-methylpseudouracil
  modified_base 452: mod_base = OTHER; note = N1-methylpseudouracil
  modified_base 458: mod_base = OTHER; note = N1-methylpseudouracil
  modified_base 460: mod_base = OTHER; note = N1-methylpseudouracil
  modified_base 462: mod_base = OTHER; note = N1-methylpseudouracil
  modified_base 464: mod_base = OTHER; note = N1-methylpseudouracil
  modified_base 467: mod_base = OTHER; note = N1-methylpseudouracil
  modified_base 469: mod_base = OTHER; note = N1-methylpseudouracil
  modified_base 470: mod_base = OTHER; note = N1-methylpseudouracil
  modified_base 473: mod_base = OTHER; note = N1-methylpseudouracil
  modified_base 476: mod_base = OTHER; note = N1-methylpseudouracil
  modified_base 485: mod_base = OTHER; note = N1-methylpseudouracil
  modified_base 488: mod_base = OTHER; note = N1-methylpseudouracil
  modified_base 491: mod_base = OTHER; note = N1-methylpseudouracil
  modified_base 503: mod_base = OTHER; note = N1-methylpseudouracil
  modified_base 505: mod_base = OTHER; note = N1-methylpseudouracil
  modified_base 506: mod_base = OTHER; note = N1-methylpseudouracil
  modified_base 512: mod_base = OTHER; note = N1-methylpseudouracil
  modified_base 516: mod_base = OTHER; note = N1-methylpseudouracil
  modified_base 521: mod_base = OTHER; note = N1-methylpseudouracil
  modified_base 527: mod_base = OTHER; note = N1-methylpseudouracil
  modified_base 533: mod_base = OTHER; note = N1-methylpseudouracil
  modified_base 539: mod_base = OTHER; note = N1-methylpseudouracil
  modified_base 545: mod_base = OTHER; note = N1-methylpseudouracil
  modified_base 547: mod_base = OTHER; note = N1-methylpseudouracil
  modified_base 548: mod_base = OTHER; note = N1-methylpseudouracil
  modified_base 550: mod_base = OTHER; note = N1-methylpseudouracil
  modified_base 554: mod_base = OTHER; note = N1-methylpseudouracil
  modified_base 557: mod_base = OTHER; note = N1-methylpseudouracil
  modified_base 559: mod_base = OTHER; note = N1-methylpseudouracil
  modified_base 572: mod_base = OTHER; note = N1-methylpseudouracil
  modified_base 578: mod_base = OTHER; note = N1-methylpseudouracil
  modified_base 580: mod_base = OTHER; note = N1-methylpseudouracil
  modified_base 590: mod_base = OTHER; note = N1-methylpseudouracil
  modified_base 593: mod_base = OTHER; note = N1-methylpseudouracil
  modified_base 597: mod_base = OTHER; note = N1-methylpseudouracil
  modified_base 602: mod_base = OTHER; note = N1-methylpseudouracil
  modified_base 608: mod_base = OTHER; note = N1-methylpseudouracil
  modified_base 617: mod_base = OTHER; note = N1-methylpseudouracil
  modified_base 620: mod_base = OTHER; note = N1-methylpseudouracil
  modified_base 626: mod_base = OTHER; note = N1-methylpseudouracil
  modified_base 629: mod_base = OTHER; note = N1-methylpseudouracil
  modified_base 641: mod_base = OTHER; note = N1-methylpseudouracil
  modified_base 649: mod_base = OTHER; note = N1-methylpseudouracil
  modified_base 650: mod_base = OTHER; note = N1-methylpseudouracil
  modified_base 661: mod_base = OTHER; note = N1-methylpseudouracil
  modified_base 662: mod_base = OTHER; note = N1-methylpseudouracil
  modified_base 668: mod_base = OTHER; note = N1-methylpseudouracil
  modified_base 676: mod_base = OTHER; note = N1-methylpseudouracil
  modified_base 677: mod_base = OTHER; note = N1-methylpseudouracil
  modified_base 680: mod_base = OTHER; note = N1-methylpseudouracil
  modified_base 682: mod_base = OTHER; note = N1-methylpseudouracil
  modified_base 686: mod_base = OTHER; note = N1-methylpseudouracil
  modified_base 687: mod_base = OTHER; note = N1-methylpseudouracil
  modified_base 695: mod_base = OTHER; note = N1-methylpseudouracil
  modified_base 701: mod_base = OTHER; note = N1-methylpseudouracil
  modified_base 705: mod_base = OTHER; note = N1-methylpseudouracil
  modified_base 707: mod_base = OTHER; note = N1-methylpseudouracil
  modified_base 710: mod_base = OTHER; note = N1-methylpseudouracil
  modified_base 713: mod_base = OTHER; note = N1-methylpseudouracil
  modified_base 719: mod_base = OTHER; note = N1-methylpseudouracil
  modified_base 722: mod_base = OTHER; note = N1-methylpseudouracil
  modified_base 724: mod_base = OTHER; note = N1-methylpseudouracil
  modified_base 731: mod_base = OTHER; note = N1-methylpseudouracil
  modified_base 734: mod_base = OTHER; note = N1-methylpseudouracil
  modified_base 742: mod_base = OTHER; note = N1-methylpseudouracil
  modified_base 744: mod_base = OTHER; note = N1-methylpseudouracil
  modified_base 748: mod_base = OTHER; note = N1-methylpseudouracil
  modified_base 749: mod_base = OTHER; note = N1-methylpseudouracil
  modified_base 751: mod_base = OTHER; note = N1-methylpseudouracil
  modified_base 758: mod_base = OTHER; note = N1-methylpseudouracil
  modified_base 763: mod_base = OTHER; note = N1-methylpseudouracil
  modified_base 764: mod_base = OTHER; note = N1-methylpseudouracil
  modified_base 765: mod_base = OTHER; note = N1-methylpseudouracil
  modified_base 767: mod_base = OTHER; note = N1-methylpseudouracil
  modified_base 770: mod_base = OTHER; note = N1-methylpseudouracil
  modified_base 773: mod_base = OTHER; note = N1-methylpseudouracil
  modified_base 776: mod_base = OTHER; note = N1-methylpseudouracil
  modified_base 782: mod_base = OTHER; note = N1-methylpseudouracil
  modified_base 784: mod_base = OTHER; note = N1-methylpseudouracil
  modified_base 785: mod_base = OTHER; note = N1-methylpseudouracil
  modified_base 792: mod_base = OTHER; note = N1-methylpseudouracil
  modified_base 797: mod_base = OTHER; note = N1-methylpseudouracil
  modified_base 806: mod_base = OTHER; note = N1-methylpseudouracil
  modified_base 809: mod_base = OTHER; note = N1-methylpseudouracil
  modified_base 812: mod_base = OTHER; note = N1-methylpseudouracil
  modified_base 817: mod_base = OTHER; note = N1-methylpseudouracil
  modified_base 825: mod_base = OTHER; note = N1-methylpseudouracil
  modified_base 842: mod_base = OTHER; note = N1-methylpseudouracil
  modified_base 854: mod_base = OTHER; note = N1-methylpseudouracil
  modified_base 857: mod_base = OTHER; note = N1-methylpseudouracil
  modified_base 860: mod_base = OTHER; note = N1-methylpseudouracil
  modified_base 864: mod_base = OTHER; note = N1-methylpseudouracil
  modified_base 872: mod_base = OTHER; note = N1-methylpseudouracil
  modified_base 875: mod_base = OTHER; note = N1-methylpseudouracil
  modified_base 884: mod_base = OTHER; note = N1-methylpseudouracil
  modified_base 893: mod_base = OTHER; note = N1-methylpseudouracil
  modified_base 900: mod_base = OTHER; note = N1-methylpseudouracil
  modified_base 901: mod_base = OTHER; note = N1-methylpseudouracil
  modified_base 904: mod_base = OTHER; note = N1-methylpseudouracil
  modified_base 906: mod_base = OTHER; note = N1-methylpseudouracil
  modified_base 907: mod_base = OTHER; note = N1-methylpseudouracil
  modified_base 920: mod_base = OTHER; note = N1-methylpseudouracil
  modified_base 929: mod_base = OTHER; note = N1-methylpseudouracil
  modified_base 932: mod_base = OTHER; note = N1-methylpseudouracil
  modified_base 941: mod_base = OTHER; note = N1-methylpseudouracil
  modified_base 956: mod_base = OTHER; note = N1-methylpseudouracil
  modified_base 962: mod_base = OTHER; note = N1-methylpseudouracil
  modified_base 966: mod_base = OTHER; note = N1-methylpseudouracil
  modified_base 979: mod_base = OTHER; note = N1-methylpseudouracil
  modified_base 983: mod_base = OTHER; note = N1-methylpseudouracil
  modified_base 988: mod_base = OTHER; note = N1-methylpseudouracil
  modified_base 990: mod_base = OTHER; note = N1-methylpseudouracil
  modified_base 991: mod_base = OTHER; note = N1-methylpseudouracil
  modified_base 992: mod_base = OTHER; note = N1-methylpseudouracil
  modified_base 997: mod_base = OTHER; note = N1-methylpseudouracil
  modified_base 1006: mod_base = OTHER; note = N1-methylpseudouracil
  modified_base 1007: mod_base = OTHER; note = N1-methylpseudouracil
  modified_base 1009: mod_base = OTHER; note = N1-methylpseudouracil
  modified_base 1010: mod_base = OTHER; note = N1-methylpseudouracil
  modified_base 1012: mod_base = OTHER; note = N1-methylpseudouracil
  modified_base 1013: mod_base = OTHER; note = N1-methylpseudouracil
  modified_base 1021: mod_base = OTHER; note = N1-methylpseudouracil
  modified_base 1022: mod_base = OTHER; note = N1-methylpseudouracil
  modified_base 1024: mod_base = OTHER; note = N1-methylpseudouracil
  modified_base 1025: mod_base = OTHER; note = N1-methylpseudouracil
  modified_base 1028: mod_base = OTHER; note = N1-methylpseudouracil
  modified_base 1031: mod_base = OTHER; note = N1-methylpseudouracil
  modified_base 1033: mod_base = OTHER; note = N1-methylpseudouracil
  modified_base 1034: mod_base = OTHER; note = N1-methylpseudouracil
  modified_base 1037: mod_base = OTHER; note = N1-methylpseudouracil
  modified_base 1043: mod_base = OTHER; note = N1-methylpseudouracil
  modified_base 1046: mod_base = OTHER; note = N1-methylpseudouracil
  modified_base 1051: mod_base = OTHER; note = N1-methylpseudouracil
  modified_base 1058: mod_base = OTHER; note = N1-methylpseudouracil
  modified_base 1061: mod_base = OTHER; note = N1-methylpseudouracil
  modified_base 1070: mod_base = OTHER; note = N1-methylpseudouracil
  modified_base 1073: mod_base = OTHER; note = N1-methylpseudouracil
  modified_base 1076: mod_base = OTHER; note = N1-methylpseudouracil
  modified_base 1085: mod_base = OTHER; note = N1-methylpseudouracil
  modified_base 1087: mod_base = OTHER; note = N1-methylpseudouracil
  modified_base 1088: mod_base = OTHER; note = N1-methylpseudouracil
  modified_base 1097: mod_base = OTHER; note = N1-methylpseudouracil
  modified_base 1098: mod_base = OTHER; note = N1-methylpseudouracil
  modified_base 1102: mod_base = OTHER; note = N1-methylpseudouracil
  modified_base 1103: mod_base = OTHER; note = N1-methylpseudouracil
  modified_base 1105: mod_base = OTHER; note = N1-methylpseudouracil
  modified_base 1109: mod_base = OTHER; note = N1-methylpseudouracil
  modified_base 1112: mod_base = OTHER; note = N1-methylpseudouracil
  modified_base 1115: mod_base = OTHER; note = N1-methylpseudouracil
  modified_base 1121: mod_base = OTHER; note = N1-methylpseudouracil
  modified_base 1127: mod_base = OTHER; note = N1-methylpseudouracil
  modified_base 1138: mod_base = OTHER; note = N1-methylpseudouracil
  modified_base 1139: mod_base = OTHER; note = N1-methylpseudouracil
  modified_base 1143: mod_base = OTHER; note = N1-methylpseudouracil
  modified_base 1144: mod_base = OTHER; note = N1-methylpseudouracil
  modified_base 1151: mod_base = OTHER; note = N1-methylpseudouracil
  modified_base 1158: mod_base = OTHER; note = N1-methylpseudouracil
  modified_base 1159: mod_base = OTHER; note = N1-methylpseudouracil
  modified_base 1162: mod_base = OTHER; note = N1-methylpseudouracil
  modified_base 1172: mod_base = OTHER; note = N1-methylpseudouracil
  modified_base 1181: mod_base = OTHER; note = N1-methylpseudouracil
  modified_base 1190: mod_base = OTHER; note = N1-methylpseudouracil
  modified_base 1198: mod_base = OTHER; note = N1-methylpseudouracil
  modified_base 1199: mod_base = OTHER; note = N1-methylpseudouracil
  modified_base 1200: mod_base = OTHER; note = N1-methylpseudouracil
  modified_base 1202: mod_base = OTHER; note = N1-methylpseudouracil
  modified_base 1216: mod_base = OTHER; note = N1-methylpseudouracil
  modified_base 1218: mod_base = OTHER; note = N1-methylpseudouracil
  modified_base 1226: mod_base = OTHER; note = N1-methylpseudouracil
  modified_base 1231: mod_base = OTHER; note = N1-methylpseudouracil
  modified_base 1238: mod_base = OTHER; note = N1-methylpseudouracil
  modified_base 1253: mod_base = OTHER; note = N1-methylpseudouracil
  modified_base 1256: mod_base = OTHER; note = N1-methylpseudouracil
  modified_base 1259: mod_base = OTHER; note = N1-methylpseudouracil
  modified_base 1268: mod_base = OTHER; note = N1-methylpseudouracil
  modified_base 1276: mod_base = OTHER; note = N1-methylpseudouracil
  modified_base 1277: mod_base = OTHER; note = N1-methylpseudouracil
  modified_base 1279: mod_base = OTHER; note = N1-methylpseudouracil
  modified_base 1289: mod_base = OTHER; note = N1-methylpseudouracil
  modified_base 1299: mod_base = OTHER; note = N1-methylpseudouracil
  modified_base 1301: mod_base = OTHER; note = N1-methylpseudouracil
  modified_base 1304: mod_base = OTHER; note = N1-methylpseudouracil
  modified_base 1313: mod_base = OTHER; note = N1-methylpseudouracil
  modified_base 1318: mod_base = OTHER; note = N1-methylpseudouracil
  modified_base 1319: mod_base = OTHER; note = N1-methylpseudouracil
  modified_base 1325: mod_base = OTHER; note = N1-methylpseudouracil
  modified_base 1340: mod_base = OTHER; note = N1-methylpseudouracil
  modified_base 1343: mod_base = OTHER; note = N1-methylpseudouracil
  modified_base 1349: mod_base = OTHER; note = N1-methylpseudouracil
  modified_base 1357: mod_base = OTHER; note = N1-methylpseudouracil
  modified_base 1359: mod_base = OTHER; note = N1-methylpseudouracil
  modified_base 1382: mod_base = OTHER; note = N1-methylpseudouracil
  modified_base 1385: mod_base = OTHER; note = N1-methylpseudouracil
  modified_base 1388: mod_base = OTHER; note = N1-methylpseudouracil
  modified_base 1391: mod_base = OTHER; note = N1-methylpseudouracil
  modified_base 1394: mod_base = OTHER; note = N1-methylpseudouracil
  modified_base 1397: mod_base = OTHER; note = N1-methylpseudouracil
  modified_base 1406: mod_base = OTHER; note = N1-methylpseudouracil
  modified_base 1427: mod_base = OTHER; note = N1-methylpseudouracil
  modified_base 1445: mod_base = OTHER; note = N1-methylpseudouracil
  modified_base 1447: mod_base = OTHER; note = N1-methylpseudouracil
  modified_base 1450: mod_base = OTHER; note = N1-methylpseudouracil
  modified_base 1451: mod_base = OTHER; note = N1-methylpseudouracil
  modified_base 1453: mod_base = OTHER; note = N1-methylpseudouracil
  modified_base 1462: mod_base = OTHER; note = N1-methylpseudouracil
  modified_base 1463: mod_base = OTHER; note = N1-methylpseudouracil
  modified_base 1465: mod_base = OTHER; note = N1-methylpseudouracil
  modified_base 1468: mod_base = OTHER; note = N1-methylpseudouracil
  modified_base 1472: mod_base = OTHER; note = N1-methylpseudouracil
  modified_base 1475: mod_base = OTHER; note = N1-methylpseudouracil
  modified_base 1487: mod_base = OTHER; note = N1-methylpseudouracil
  modified_base 1499: mod_base = OTHER; note = N1-methylpseudouracil
  modified_base 1502: mod_base = OTHER; note = N1-methylpseudouracil
  modified_base 1504: mod_base = OTHER; note = N1-methylpseudouracil
  modified_base 1505: mod_base = OTHER; note = N1-methylpseudouracil
  modified_base 1511: mod_base = OTHER; note = N1-methylpseudouracil
  modified_base 1516: mod_base = OTHER; note = N1-methylpseudouracil
  modified_base 1525: mod_base = OTHER; note = N1-methylpseudouracil
  modified_base 1531: mod_base = OTHER; note = N1-methylpseudouracil
  modified_base 1541: mod_base = OTHER; note = N1-methylpseudouracil
  modified_base 1544: mod_base = OTHER; note = N1-methylpseudouracil
  modified_base 1552: mod_base = OTHER; note = N1-methylpseudouracil
  modified_base 1559: mod_base = OTHER; note = N1-methylpseudouracil
  modified_base 1571: mod_base = OTHER; note = N1-methylpseudouracil
  modified_base 1573: mod_base = OTHER; note = N1-methylpseudouracil
  modified_base 1579: mod_base = OTHER; note = N1-methylpseudouracil
  modified_base 1580: mod_base = OTHER; note = N1-methylpseudouracil
  modified_base 1581: mod_base = OTHER; note = N1-methylpseudouracil
  modified_base 1601: mod_base = OTHER; note = N1-methylpseudouracil
  modified_base 1604: mod_base = OTHER; note = N1-methylpseudouracil
  modified_base 1619: mod_base = OTHER; note = N1-methylpseudouracil
  modified_base 1625: mod_base = OTHER; note = N1-methylpseudouracil
  modified_base 1627: mod_base = OTHER; note = N1-methylpseudouracil
  modified_base 1632: mod_base = OTHER; note = N1-methylpseudouracil
  modified_base 1641: mod_base = OTHER; note = N1-methylpseudouracil
  modified_base 1649: mod_base = OTHER; note = N1-methylpseudouracil
  modified_base 1651: mod_base = OTHER; note = N1-methylpseudouracil
  modified_base 1655: mod_base = OTHER; note = N1-methylpseudouracil
  modified_base 1665: mod_base = OTHER; note = N1-methylpseudouracil
  modified_base 1667: mod_base = OTHER; note = N1-methylpseudouracil
  modified_base 1669: mod_base = OTHER; note = N1-methylpseudouracil
  modified_base 1685: mod_base = OTHER; note = N1-methylpseudouracil
  modified_base 1687: mod_base = OTHER; note = N1-methylpseudouracil
  modified_base 1691: mod_base = OTHER; note = N1-methylpseudouracil
  modified_base 1694: mod_base = OTHER; note = N1-methylpseudouracil
  modified_base 1704: mod_base = OTHER; note = N1-methylpseudouracil
  modified_base 1705: mod_base = OTHER; note = N1-methylpseudouracil
  modified_base 1706: mod_base = OTHER; note = N1-methylpseudouracil
  modified_base 1707: mod_base = OTHER; note = N1-methylpseudouracil
  modified_base 1711: mod_base = OTHER; note = N1-methylpseudouracil
  modified_base 1715: mod_base = OTHER; note = N1-methylpseudouracil
  modified_base 1721: mod_base = OTHER; note = N1-methylpseudouracil
  modified_base 1724: mod_base = OTHER; note = N1-methylpseudouracil
  modified_base 1739: mod_base = OTHER; note = N1-methylpseudouracil
  modified_base 1741: mod_base = OTHER; note = N1-methylpseudouracil
  modified_base 1742: mod_base = OTHER; note = N1-methylpseudouracil
  modified_base 1747: mod_base = OTHER; note = N1-methylpseudouracil
  modified_base 1750: mod_base = OTHER; note = N1-methylpseudouracil
  modified_base 1754: mod_base = OTHER; note = N1-methylpseudouracil
  modified_base 1756: mod_base = OTHER; note = N1-methylpseudouracil
  modified_base 1758: mod_base = OTHER; note = N1-methylpseudouracil
  modified_base 1763: mod_base = OTHER; note = N1-methylpseudouracil
  modified_base 1766: mod_base = OTHER; note = N1-methylpseudouracil
  modified_base 1784: mod_base = OTHER; note = N1-methylpseudouracil
  modified_base 1787: mod_base = OTHER; note = N1-methylpseudouracil
  modified_base 1790: mod_base = OTHER; note = N1-methylpseudouracil
  modified_base 1802: mod_base = OTHER; note = N1-methylpseudouracil
  modified_base 1809: mod_base = OTHER; note = N1-methylpseudouracil
  modified_base 1811: mod_base = OTHER; note = N1-methylpseudouracil
  modified_base 1829: mod_base = OTHER; note = N1-methylpseudouracil
  modified_base 1832: mod_base = OTHER; note = N1-methylpseudouracil
  modified_base 1835: mod_base = OTHER; note = N1-methylpseudouracil
  modified_base 1838: mod_base = OTHER; note = N1-methylpseudouracil
  modified_base 1849: mod_base = OTHER; note = N1-methylpseudouracil
  modified_base 1855: mod_base = OTHER; note = N1-methylpseudouracil
  modified_base 1858: mod_base = OTHER; note = N1-methylpseudouracil
  modified_base 1859: mod_base = OTHER; note = N1-methylpseudouracil
  modified_base 1861: mod_base = OTHER; note = N1-methylpseudouracil
  modified_base 1870: mod_base = OTHER; note = N1-methylpseudouracil
  modified_base 1871: mod_base = OTHER; note = N1-methylpseudouracil
  modified_base 1880: mod_base = OTHER; note = N1-methylpseudouracil
  modified_base 1889: mod_base = OTHER; note = N1-methylpseudouracil
  modified_base 1900: mod_base = OTHER; note = N1-methylpseudouracil
  modified_base 1901: mod_base = OTHER; note = N1-methylpseudouracil
  modified_base 1906: mod_base = OTHER; note = N1-methylpseudouracil
  modified_base 1913: mod_base = OTHER; note = N1-methylpseudouracil
  modified_base 1916: mod_base = OTHER; note = N1-methylpseudouracil
  modified_base 1921: mod_base = OTHER; note = N1-methylpseudouracil
  modified_base 1926: mod_base = OTHER; note = N1-methylpseudouracil
  modified_base 1930: mod_base = OTHER; note = N1-methylpseudouracil
  modified_base 1931: mod_base = OTHER; note = N1-methylpseudouracil
  modified_base 1939: mod_base = OTHER; note = N1-methylpseudouracil
  modified_base 1940: mod_base = OTHER; note = N1-methylpseudouracil
  modified_base 1942: mod_base = OTHER; note = N1-methylpseudouracil
  modified_base 1960: mod_base = OTHER; note = N1-methylpseudouracil
  modified_base 1964: mod_base = OTHER; note = N1-methylpseudouracil
  modified_base 1965: mod_base = OTHER; note = N1-methylpseudouracil
  modified_base 1967: mod_base = OTHER; note = N1-methylpseudouracil
  modified_base 1979: mod_base = OTHER; note = N1-methylpseudouracil
  modified_base 1987: mod_base = OTHER; note = N1-methylpseudouracil
  modified_base 1988: mod_base = OTHER; note = N1-methylpseudouracil
  modified_base 1990: mod_base = OTHER; note = N1-methylpseudouracil
  modified_base 1994: mod_base = OTHER; note = N1-methylpseudouracil
  modified_base 2012: mod_base = OTHER; note = N1-methylpseudouracil
  modified_base 2017: mod_base = OTHER; note = N1-methylpseudouracil
  modified_base 2041: mod_base = OTHER; note = N1-methylpseudouracil
  modified_base 2042: mod_base = OTHER; note = N1-methylpseudouracil
  modified_base 2059: mod_base = OTHER; note = N1-methylpseudouracil
  modified_base 2060: mod_base = OTHER; note = N1-methylpseudouracil
  modified_base 2080: mod_base = OTHER; note = N1-methylpseudouracil
  modified_base 2084: mod_base = OTHER; note = N1-methylpseudouracil
  modified_base 2087: mod_base = OTHER; note = N1-methylpseudouracil
  modified_base 2096: mod_base = OTHER; note = N1-methylpseudouracil
  modified_base 2105: mod_base = OTHER; note = N1-methylpseudouracil
  modified_base 2113: mod_base = OTHER; note = N1-methylpseudouracil
  modified_base 2114: mod_base = OTHER; note = N1-methylpseudouracil
  modified_base 2120: mod_base = OTHER; note = N1-methylpseudouracil
  modified_base 2123: mod_base = OTHER; note = N1-methylpseudouracil
  modified_base 2136: mod_base = OTHER; note = N1-methylpseudouracil
  modified_base 2138: mod_base = OTHER; note = N1-methylpseudouracil
  modified_base 2144: mod_base = OTHER; note = N1-methylpseudouracil
  modified_base 2153: mod_base = OTHER; note = N1-methylpseudouracil
  modified_base 2177: mod_base = OTHER; note = N1-methylpseudouracil
  modified_base 2189: mod_base = OTHER; note = N1-methylpseudouracil
  modified_base 2191: mod_base = OTHER; note = N1-methylpseudouracil
  modified_base 2195: mod_base = OTHER; note = N1-methylpseudouracil
  modified_base 2198: mod_base = OTHER; note = N1-methylpseudouracil
  modified_base 2225: mod_base = OTHER; note = N1-methylpseudouracil
  modified_base 2228: mod_base = OTHER; note = N1-methylpseudouracil
  modified_base 2237: mod_base = OTHER; note = N1-methylpseudouracil
  modified_base 2239: mod_base = OTHER; note = N1-methylpseudouracil
  modified_base 2243: mod_base = OTHER; note = N1-methylpseudouracil
  modified_base 2246: mod_base = OTHER; note = N1-methylpseudouracil
  modified_base 2248: mod_base = OTHER; note = N1-methylpseudouracil
  modified_base 2253: mod_base = OTHER; note = N1-methylpseudouracil
  modified_base 2264: mod_base = OTHER; note = N1-methylpseudouracil
  modified_base 2288: mod_base = OTHER; note = N1-methylpseudouracil
  modified_base 2291: mod_base = OTHER; note = N1-methylpseudouracil
  modified_base 2297: mod_base = OTHER; note = N1-methylpseudouracil
  modified_base 2300: mod_base = OTHER; note = N1-methylpseudouracil
  modified_base 2312: mod_base = OTHER; note = N1-methylpseudouracil
  modified_base 2328: mod_base = OTHER; note = N1-methylpseudouracil
  modified_base 2330: mod_base = OTHER; note = N1-methylpseudouracil
  modified_base 2343: mod_base = OTHER; note = N1-methylpseudouracil
  modified_base 2363: mod_base = OTHER; note = N1-methylpseudouracil
  modified_base 2369: mod_base = OTHER; note = N1-methylpseudouracil
  modified_base 2373: mod_base = OTHER; note = N1-methylpseudouracil
  modified_base 2387: mod_base = OTHER; note = N1-methylpseudouracil
  modified_base 2396: mod_base = OTHER; note = N1-methylpseudouracil
  modified_base 2402: mod_base = OTHER; note = N1-methylpseudouracil
  modified_base 2404: mod_base = OTHER; note = N1-methylpseudouracil
  modified_base 2417: mod_base = OTHER; note = N1-methylpseudouracil
  modified_base 2435: mod_base = OTHER; note = N1-methylpseudouracil
  modified_base 2441: mod_base = OTHER; note = N1-methylpseudouracil
  modified_base 2453: mod_base = OTHER; note = N1-methylpseudouracil
  modified_base 2468: mod_base = OTHER; note = N1-methylpseudouracil
  modified_base 2476: mod_base = OTHER; note = N1-methylpseudouracil
  modified_base 2479: mod_base = OTHER; note = N1-methylpseudouracil
  modified_base 2480: mod_base = OTHER; note = N1-methylpseudouracil
  modified_base 2482: mod_base = OTHER; note = N1-methylpseudouracil
  modified_base 2483: mod_base = OTHER; note = N1-methylpseudouracil
  modified_base 2492: mod_base = OTHER; note = N1-methylpseudouracil
  modified_base 2497: mod_base = OTHER; note = N1-methylpseudouracil
  modified_base 2501: mod_base = OTHER; note = N1-methylpseudouracil
  modified_base 2510: mod_base = OTHER; note = N1-methylpseudouracil
  modified_base 2518: mod_base = OTHER; note = N1-methylpseudouracil
  modified_base 2527: mod_base = OTHER; note = N1-methylpseudouracil
  modified_base 2531: mod_base = OTHER; note = N1-methylpseudouracil
  modified_base 2536: mod_base = OTHER; note = N1-methylpseudouracil
  modified_base 2540: mod_base = OTHER; note = N1-methylpseudouracil
  modified_base 2546: mod_base = OTHER; note = N1-methylpseudouracil
  modified_base 2558: mod_base = OTHER; note = N1-methylpseudouracil
  modified_base 2561: mod_base = OTHER; note = N1-methylpseudouracil
  modified_base 2563: mod_base = OTHER; note = N1-methylpseudouracil
  modified_base 2564: mod_base = OTHER; note = N1-methylpseudouracil
  modified_base 2567: mod_base = OTHER; note = N1-methylpseudouracil
  modified_base 2570: mod_base = OTHER; note = N1-methylpseudouracil
  modified_base 2573: mod_base = OTHER; note = N1-methylpseudouracil
  modified_base 2575: mod_base = OTHER; note = N1-methylpseudouracil
  modified_base 2578: mod_base = OTHER; note = N1-methylpseudouracil
  modified_base 2582: mod_base = OTHER; note = N1-methylpseudouracil
  modified_base 2585: mod_base = OTHER; note = N1-methylpseudouracil
  modified_base 2588: mod_base = OTHER; note = N1-methylpseudouracil
  modified_base 2590: mod_base = OTHER; note = N1-methylpseudouracil
  modified_base 2591: mod_base = OTHER; note = N1-methylpseudouracil
  modified_base 2593: mod_base = OTHER; note = N1-methylpseudouracil
  modified_base 2594: mod_base = OTHER; note = N1-methylpseudouracil
  modified_base 2603: mod_base = OTHER; note = N1-methylpseudouracil
  modified_base 2611: mod_base = OTHER; note = N1-methylpseudouracil
  modified_base 2615: mod_base = OTHER; note = N1-methylpseudouracil
  modified_base 2618: mod_base = OTHER; note = N1-methylpseudouracil
  modified_base 2621: mod_base = OTHER; note = N1-methylpseudouracil
  modified_base 2624: mod_base = OTHER; note = N1-methylpseudouracil
  modified_base 2626: mod_base = OTHER; note = N1-methylpseudouracil
  modified_base 2630: mod_base = OTHER; note = N1-methylpseudouracil
  modified_base 2633: mod_base = OTHER; note = N1-methylpseudouracil
  modified_base 2640: mod_base = OTHER; note = N1-methylpseudouracil
  modified_base 2648: mod_base = OTHER; note = N1-methylpseudouracil
  modified_base 2665: mod_base = OTHER; note = N1-methylpseudouracil
  modified_base 2689: mod_base = OTHER; note = N1-methylpseudouracil
  modified_base 2696: mod_base = OTHER; note = N1-methylpseudouracil
  modified_base 2699: mod_base = OTHER; note = N1-methylpseudouracil
  modified_base 2702: mod_base = OTHER; note = N1-methylpseudouracil
  modified_base 2707: mod_base = OTHER; note = N1-methylpseudouracil
  modified_base 2719: mod_base = OTHER; note = N1-methylpseudouracil
  modified_base 2722: mod_base = OTHER; note = N1-methylpseudouracil
  modified_base 2726: mod_base = OTHER; note = N1-methylpseudouracil
  modified_base 2728: mod_base = OTHER; note = N1-methylpseudouracil
  modified_base 2729: mod_base = OTHER; note = N1-methylpseudouracil
  modified_base 2731: mod_base = OTHER; note = N1-methylpseudouracil
  modified_base 2735: mod_base = OTHER; note = N1-methylpseudouracil
  modified_base 2737: mod_base = OTHER; note = N1-methylpseudouracil
  modified_base 2741: mod_base = OTHER; note = N1-methylpseudouracil
  modified_base 2747: mod_base = OTHER; note = N1-methylpseudouracil
  modified_base 2759: mod_base = OTHER; note = N1-methylpseudouracil
  modified_base 2762: mod_base = OTHER; note = N1-methylpseudouracil
  modified_base 2768: mod_base = OTHER; note = N1-methylpseudouracil
  modified_base 2773: mod_base = OTHER; note = N1-methylpseudouracil
  modified_base 2774: mod_base = OTHER; note = N1-methylpseudouracil
  modified_base 2776: mod_base = OTHER; note = N1-methylpseudouracil
  modified_base 2777: mod_base = OTHER; note = N1-methylpseudouracil
  modified_base 2786: mod_base = OTHER; note = N1-methylpseudouracil
  modified_base 2790: mod_base = OTHER; note = N1-methylpseudouracil
  modified_base 2792: mod_base = OTHER; note = N1-methylpseudouracil
  modified_base 2795: mod_base = OTHER; note = N1-methylpseudouracil
  modified_base 2804: mod_base = OTHER; note = N1-methylpseudouracil
  modified_base 2807: mod_base = OTHER; note = N1-methylpseudouracil
  modified_base 2813: mod_base = OTHER; note = N1-methylpseudouracil
  modified_base 2822: mod_base = OTHER; note = N1-methylpseudouracil
  modified_base 2825: mod_base = OTHER; note = N1-methylpseudouracil
  modified_base 2837: mod_base = OTHER; note = N1-methylpseudouracil
  modified_base 2840: mod_base = OTHER; note = N1-methylpseudouracil
  modified_base 2849: mod_base = OTHER; note = N1-methylpseudouracil
  modified_base 2852: mod_base = OTHER; note = N1-methylpseudouracil
  modified_base 2859: mod_base = OTHER; note = N1-methylpseudouracil
  modified_base 2864: mod_base = OTHER; note = N1-methylpseudouracil
  modified_base 2866: mod_base = OTHER; note = N1-methylpseudouracil
  modified_base 2873: mod_base = OTHER; note = N1-methylpseudouracil
  modified_base 2882: mod_base = OTHER; note = N1-methylpseudouracil
  modified_base 2897: mod_base = OTHER; note = N1-methylpseudouracil
  modified_base 2900: mod_base = OTHER; note = N1-methylpseudouracil
  modified_base 2908: mod_base = OTHER; note = N1-methylpseudouracil
  modified_base 2909: mod_base = OTHER; note = N1-methylpseudouracil
  modified_base 2921: mod_base = OTHER; note = N1-methylpseudouracil
  modified_base 2927: mod_base = OTHER; note = N1-methylpseudouracil
  modified_base 2928: mod_base = OTHER; note = N1-methylpseudouracil
  modified_base 2930: mod_base = OTHER; note = N1-methylpseudouracil
  modified_base 2937: mod_base = OTHER; note = N1-methylpseudouracil
  modified_base 2939: mod_base = OTHER; note = N1-methylpseudouracil
  modified_base 2942: mod_base = OTHER; note = N1-methylpseudouracil
  modified_base 2948: mod_base = OTHER; note = N1-methylpseudouracil
  modified_base 2954: mod_base = OTHER; note = N1-methylpseudouracil
  modified_base 2956: mod_base = OTHER; note = N1-methylpseudouracil
  modified_base 2957: mod_base = OTHER; note = N1-methylpseudouracil
  modified_base 2962: mod_base = OTHER; note = N1-methylpseudouracil
  modified_base 2963: mod_base = OTHER; note = N1-methylpseudouracil
  modified_base 2966: mod_base = OTHER; note = N1-methylpseudouracil
  modified_base 2972: mod_base = OTHER; note = N1-methylpseudouracil
  modified_base 2975: mod_base = OTHER; note = N1-methylpseudouracil
  modified_base 2978: mod_base = OTHER; note = N1-methylpseudouracil
  modified_base 2981: mod_base = OTHER; note = N1-methylpseudouracil
  modified_base 2984: mod_base = OTHER; note = N1-methylpseudouracil
  modified_base 2987: mod_base = OTHER; note = N1-methylpseudouracil
  modified_base 2996: mod_base = OTHER; note = N1-methylpseudouracil
  modified_base 3002: mod_base = OTHER; note = N1-methylpseudouracil
  modified_base 3005: mod_base = OTHER; note = N1-methylpseudouracil
  modified_base 3011: mod_base = OTHER; note = N1-methylpseudouracil
  modified_base 3014: mod_base = OTHER; note = N1-methylpseudouracil
  modified_base 3022: mod_base = OTHER; note = N1-methylpseudouracil
  modified_base 3026: mod_base = OTHER; note = N1-methylpseudouracil
  modified_base 3028: mod_base = OTHER; note = N1-methylpseudouracil
  modified_base 3029: mod_base = OTHER; note = N1-methylpseudouracil
  modified_base 3032: mod_base = OTHER; note = N1-methylpseudouracil
  modified_base 3041: mod_base = OTHER; note = N1-methylpseudouracil
  modified_base 3047: mod_base = OTHER; note = N1-methylpseudouracil
  modified_base 3050: mod_base = OTHER; note = N1-methylpseudouracil
  modified_base 3053: mod_base = OTHER; note = N1-methylpseudouracil
  modified_base 3058: mod_base = OTHER; note = N1-methylpseudouracil
  modified_base 3059: mod_base = OTHER; note = N1-methylpseudouracil
  modified_base 3062: mod_base = OTHER; note = N1-methylpseudouracil
  modified_base 3065: mod_base = OTHER; note = N1-methylpseudouracil
  modified_base 3068: mod_base = OTHER; note = N1-methylpseudouracil
  modified_base 3076: mod_base = OTHER; note = N1-methylpseudouracil
  modified_base 3079: mod_base = OTHER; note = N1-methylpseudouracil
  modified_base 3080: mod_base = OTHER; note = N1-methylpseudouracil
  modified_base 3083: mod_base = OTHER; note = N1-methylpseudouracil
  modified_base 3091: mod_base = OTHER; note = N1-methylpseudouracil
  modified_base 3101: mod_base = OTHER; note = N1-methylpseudouracil
  modified_base 3110: mod_base = OTHER; note = N1-methylpseudouracil
  modified_base 3134: mod_base = OTHER; note = N1-methylpseudouracil
  modified_base 3136: mod_base = OTHER; note = N1-methylpseudouracil
  modified_base 3137: mod_base = OTHER; note = N1-methylpseudouracil
  modified_base 3146: mod_base = OTHER; note = N1-methylpseudouracil
  modified_base 3149: mod_base = OTHER; note = N1-methylpseudouracil
  modified_base 3153: mod_base = OTHER; note = N1-methylpseudouracil
  modified_base 3158: mod_base = OTHER; note = N1-methylpseudouracil
  modified_base 3167: mod_base = OTHER; note = N1-methylpseudouracil
  modified_base 3169: mod_base = OTHER; note = N1-methylpseudouracil
  modified_base 3176: mod_base = OTHER; note = N1-methylpseudouracil
  modified_base 3184: mod_base = OTHER; note = N1-methylpseudouracil
  modified_base 3185: mod_base = OTHER; note = N1-methylpseudouracil
  modified_base 3199: mod_base = OTHER; note = N1-methylpseudouracil
  modified_base 3202: mod_base = OTHER; note = N1-methylpseudouracil
  modified_base 3203: mod_base = OTHER; note = N1-methylpseudouracil
  modified_base 3212: mod_base = OTHER; note = N1-methylpseudouracil
  modified_base 3214: mod_base = OTHER; note = N1-methylpseudouracil
  modified_base 3215: mod_base = OTHER; note = N1-methylpseudouracil
  modified_base 3225: mod_base = OTHER; note = N1-methylpseudouracil
  modified_base 3227: mod_base = OTHER; note = N1-methylpseudouracil
  modified_base 3233: mod_base = OTHER; note = N1-methylpseudouracil
  modified_base 3247: mod_base = OTHER; note = N1-methylpseudouracil
  modified_base 3250: mod_base = OTHER; note = N1-methylpseudouracil
  modified_base 3251: mod_base = OTHER; note = N1-methylpseudouracil
  modified_base 3254: mod_base = OTHER; note = N1-methylpseudouracil
  modified_base 3256: mod_base = OTHER; note = N1-methylpseudouracil
  modified_base 3260: mod_base = OTHER; note = N1-methylpseudouracil
  modified_base 3269: mod_base = OTHER; note = N1-methylpseudouracil
  modified_base 3274: mod_base = OTHER; note = N1-methylpseudouracil
  modified_base 3277: mod_base = OTHER; note = N1-methylpseudouracil
  modified_base 3278: mod_base = OTHER; note = N1-methylpseudouracil
  modified_base 3284: mod_base = OTHER; note = N1-methylpseudouracil
  modified_base 3290: mod_base = OTHER; note = N1-methylpseudouracil
  modified_base 3296: mod_base = OTHER; note = N1-methylpseudouracil
  modified_base 3299: mod_base = OTHER; note = N1-methylpseudouracil
  modified_base 3301: mod_base = OTHER; note = N1-methylpseudouracil
  modified_base 3302: mod_base = OTHER; note = N1-methylpseudouracil
  modified_base 3305: mod_base = OTHER; note = N1-methylpseudouracil
  modified_base 3308: mod_base = OTHER; note = N1-methylpseudouracil
  modified_base 3310: mod_base = OTHER; note = N1-methylpseudouracil
  modified_base 3311: mod_base = OTHER; note = N1-methylpseudouracil
  modified_base 3313: mod_base = OTHER; note = N1-methylpseudouracil
  modified_base 3314: mod_base = OTHER; note = N1-methylpseudouracil
  modified_base 3317: mod_base = OTHER; note = N1-methylpseudouracil
  modified_base 3323: mod_base = OTHER; note = N1-methylpseudouracil
  modified_base 3328: mod_base = OTHER; note = N1-methylpseudouracil
  modified_base 3329: mod_base = OTHER; note = N1-methylpseudouracil
  modified_base 3332: mod_base = OTHER; note = N1-methylpseudouracil
  modified_base 3334: mod_base = OTHER; note = N1-methylpseudouracil
  modified_base 3338: mod_base = OTHER; note = N1-methylpseudouracil
  modified_base 3341: mod_base = OTHER; note = N1-methylpseudouracil
  modified_base 3368: mod_base = OTHER; note = N1-methylpseudouracil
  modified_base 3374: mod_base = OTHER; note = N1-methylpseudouracil
  modified_base 3377: mod_base = OTHER; note = N1-methylpseudouracil
  modified_base 3380: mod_base = OTHER; note = N1-methylpseudouracil
  modified_base 3386: mod_base = OTHER; note = N1-methylpseudouracil
  modified_base 3392: mod_base = OTHER; note = N1-methylpseudouracil
  modified_base 3396: mod_base = OTHER; note = N1-methylpseudouracil
  modified_base 3398: mod_base = OTHER; note = N1-methylpseudouracil
  modified_base 3401: mod_base = OTHER; note = N1-methylpseudouracil
  modified_base 3410: mod_base = OTHER; note = N1-methylpseudouracil
  modified_base 3415: mod_base = OTHER; note = N1-methylpseudouracil
  modified_base 3422: mod_base = OTHER; note = N1-methylpseudouracil
  modified_base 3434: mod_base = OTHER; note = N1-methylpseudouracil
  modified_base 3440: mod_base = OTHER; note = N1-methylpseudouracil
  modified_base 3449: mod_base = OTHER; note = N1-methylpseudouracil
  modified_base 3452: mod_base = OTHER; note = N1-methylpseudouracil
  modified_base 3457: mod_base = OTHER; note = N1-methylpseudouracil
  modified_base 3461: mod_base = OTHER; note = N1-methylpseudouracil
  modified_base 3463: mod_base = OTHER; note = N1-methylpseudouracil
  modified_base 3470: mod_base = OTHER; note = N1-methylpseudouracil
  modified_base 3472: mod_base = OTHER; note = N1-methylpseudouracil
  modified_base 3473: mod_base = OTHER; note = N1-methylpseudouracil
  modified_base 3478: mod_base = OTHER; note = N1-methylpseudouracil
  modified_base 3479: mod_base = OTHER; note = N1-methylpseudouracil
  modified_base 3482: mod_base = OTHER; note = N1-methylpseudouracil
  modified_base 3488: mod_base = OTHER; note = N1-methylpseudouracil
  modified_base 3526: mod_base = OTHER; note = N1-methylpseudouracil
  modified_base 3542: mod_base = OTHER; note = N1-methylpseudouracil
  modified_base 3551: mod_base = OTHER; note = N1-methylpseudouracil
  modified_base 3554: mod_base = OTHER; note = N1-methylpseudouracil
  modified_base 3557: mod_base = OTHER; note = N1-methylpseudouracil
  modified_base 3558: mod_base = OTHER; note = N1-methylpseudouracil
  modified_base 3560: mod_base = OTHER; note = N1-methylpseudouracil
  modified_base 3575: mod_base = OTHER; note = N1-methylpseudouracil
  modified_base 3590: mod_base = OTHER; note = N1-methylpseudouracil
  modified_base 3592: mod_base = OTHER; note = N1-methylpseudouracil
  modified_base 3597: mod_base = OTHER; note = N1-methylpseudouracil
  modified_base 3598: mod_base = OTHER; note = N1-methylpseudouracil
  modified_base 3611: mod_base = OTHER; note = N1-methylpseudouracil
  modified_base 3617: mod_base = OTHER; note = N1-methylpseudouracil
  modified_base 3626: mod_base = OTHER; note = N1-methylpseudouracil
  modified_base 3637: mod_base = OTHER; note = N1-methylpseudouracil
  modified_base 3659: mod_base = OTHER; note = N1-methylpseudouracil
  modified_base 3662: mod_base = OTHER; note = N1-methylpseudouracil
  modified_base 3671: mod_base = OTHER; note = N1-methylpseudouracil
  modified_base 3676: mod_base = OTHER; note = N1-methylpseudouracil
  modified_base 3677: mod_base = OTHER; note = N1-methylpseudouracil
  modified_base 3679: mod_base = OTHER; note = N1-methylpseudouracil
  modified_base 3683: mod_base = OTHER; note = N1-methylpseudouracil
  modified_base 3684: mod_base = OTHER; note = N1-methylpseudouracil
  modified_base 3690: mod_base = OTHER; note = N1-methylpseudouracil
  modified_base 3701: mod_base = OTHER; note = N1-methylpseudouracil
  modified_base 3707: mod_base = OTHER; note = N1-methylpseudouracil
  modified_base 3709: mod_base = OTHER; note = N1-methylpseudouracil
  modified_base 3710: mod_base = OTHER; note = N1-methylpseudouracil
  modified_base 3726: mod_base = OTHER; note = N1-methylpseudouracil
  modified_base 3740: mod_base = OTHER; note = N1-methylpseudouracil
  modified_base 3743: mod_base = OTHER; note = N1-methylpseudouracil
  modified_base 3745: mod_base = OTHER; note = N1-methylpseudouracil
  modified_base 3751: mod_base = OTHER; note = N1-methylpseudouracil
  modified_base 3752: mod_base = OTHER; note = N1-methylpseudouracil
  modified_base 3755: mod_base = OTHER; note = N1-methylpseudouracil
  modified_base 3761: mod_base = OTHER; note = N1-methylpseudouracil
  modified_base 3764: mod_base = OTHER; note = N1-methylpseudouracil
  modified_base 3782: mod_base = OTHER; note = N1-methylpseudouracil
  modified_base 3788: mod_base = OTHER; note = N1-methylpseudouracil
  modified_base 3797: mod_base = OTHER; note = N1-methylpseudouracil
  modified_base 3802: mod_base = OTHER; note = N1-methylpseudouracil
  modified_base 3812: mod_base = OTHER; note = N1-methylpseudouracil
  modified_base 3818: mod_base = OTHER; note = N1-methylpseudouracil
  modified_base 3826: mod_base = OTHER; note = N1-methylpseudouracil
  modified_base 3838: mod_base = OTHER; note = N1-methylpseudouracil
  modified_base 3839: mod_base = OTHER; note = N1-methylpseudouracil
  modified_base 3845: mod_base = OTHER; note = N1-methylpseudouracil
  modified_base 3848: mod_base = OTHER; note = N1-methylpseudouracil
  modified_base 3860: mod_base = OTHER; note = N1-methylpseudouracil
  modified_base 3862: mod_base = OTHER; note = N1-methylpseudouracil
  modified_base 3863: mod_base = OTHER; note = N1-methylpseudouracil
  modified_base 3864: mod_base = OTHER; note = N1-methylpseudouracil
  modified_base 3866: mod_base = OTHER; note = N1-methylpseudouracil
  modified_base 3867: mod_base = OTHER; note = N1-methylpseudouracil
  modified_base 3868: mod_base = OTHER; note = N1-methylpseudouracil
  modified_base 3869: mod_base = OTHER; note = N1-methylpseudouracil
  modified_base 3871: mod_base = OTHER; note = N1-methylpseudouracil
  modified_base 3873: mod_base = OTHER; note = N1-methylpseudouracil
  modified_base 3880: mod_base = OTHER; note = N1-methylpseudouracil
  modified_base 3881: mod_base = OTHER; note = N1-methylpseudouracil
  modified_base 3882: mod_base = OTHER; note = N1-methylpseudouracil
  modified_base 3893: mod_base = OTHER; note = N1-methylpseudouracil
  modified_base 3901: mod_base = OTHER; note = N1-methylpseudouracil
  modified_base 3910: mod_base = OTHER; note = N1-methylpseudouracil
  modified_base 3913: mod_base = OTHER; note = N1-methylpseudouracil
  modified_base 3926: mod_base = OTHER; note = N1-methylpseudouracil
  modified_base 3928: mod_base = OTHER; note = N1-methylpseudouracil
  modified_base 3935: mod_base = OTHER; note = N1-methylpseudouracil
  modified_base 3947: mod_base = OTHER; note = N1-methylpseudouracil
  modified_base 3953: mod_base = OTHER; note = N1-methylpseudouracil
  modified_base 3958: mod_base = OTHER; note = N1-methylpseudouracil
  modified_base 3962: mod_base = OTHER; note = N1-methylpseudouracil
  modified_base 3965: mod_base = OTHER; note = N1-methylpseudouracil
  modified_base 3973: mod_base = OTHER; note = N1-methylpseudouracil
  modified_base 3974: mod_base = OTHER; note = N1-methylpseudouracil
  modified_base 3986: mod_base = OTHER; note = N1-methylpseudouracil
  modified_base 3991: mod_base = OTHER; note = N1-methylpseudouracil
  modified_base 3992: mod_base = OTHER; note = N1-methylpseudouracil
  modified_base 3995: mod_base = OTHER; note = N1-methylpseudouracil
  modified_base 3998: mod_base = OTHER; note = N1-methylpseudouracil
  modified_base 4001: mod_base = OTHER; note = N1-methylpseudouracil
  modified_base 4012: mod_base = OTHER; note = N1-methylpseudouracil
  modified_base 4016: mod_base = OTHER; note = N1-methylpseudouracil
  modified_base 4019: mod_base = OTHER; note = N1-methylpseudouracil
  modified_base 4040: mod_base = OTHER; note = N1-methylpseudouracil
  modified_base 4043: mod_base = OTHER; note = N1-methylpseudouracil
  modified_base 4045: mod_base = OTHER; note = N1-methylpseudouracil
  modified_base 4049: mod_base = OTHER; note = N1-methylpseudouracil
  modified_base 4061: mod_base = OTHER; note = N1-methylpseudouracil
  modified_base 4064: mod_base = OTHER; note = N1-methylpseudouracil
  modified_base 4079: mod_base = OTHER; note = N1-methylpseudouracil
  modified_base 4082: mod_base = OTHER; note = N1-methylpseudouracil
  modified_base 4085: mod_base = OTHER; note = N1-methylpseudouracil
  modified_base 4088: mod_base = OTHER; note = N1-methylpseudouracil
  modified_base 4099: mod_base = OTHER; note = N1-methylpseudouracil
  modified_base 4109: mod_base = OTHER; note = N1-methylpseudouracil
  modified_base 4113: mod_base = OTHER; note = N1-methylpseudouracil
  modified_base 4118: mod_base = OTHER; note = N1-methylpseudouracil
  modified_base 4123: mod_base = OTHER; note = N1-methylpseudouracil
  modified_base 4130: mod_base = OTHER; note = N1-methylpseudouracil
  modified_base 4133: mod_base = OTHER; note = N1-methylpseudouracil
  modified_base 4145: mod_base = OTHER; note = N1-methylpseudouracil
  modified_base 4156: mod_base = OTHER; note = N1-methylpseudouracil
  modified_base 4157: mod_base = OTHER; note = N1-methylpseudouracil
  modified_base 4165: mod_base = OTHER; note = N1-methylpseudouracil
  modified_base 4172: mod_base = OTHER; note = N1-methylpseudouracil
  modified_base 4175: mod_base = OTHER; note = N1-methylpseudouracil
  modified_base 4178: mod_base = OTHER; note = N1-methylpseudouracil
  modified_base 4180: mod_base = OTHER; note = N1-methylpseudouracil
  modified_base 4193: mod_base = OTHER; note = N1-methylpseudouracil
  modified_base 4200: mod_base = OTHER; note = N1-methylpseudouracil
  modified_base 4202: mod_base = OTHER; note = N1-methylpseudouracil
  modified_base 4205: mod_base = OTHER; note = N1-methylpseudouracil
  modified_base 4210: mod_base = OTHER; note = N1-methylpseudouracil
  modified_base 4219: mod_base = OTHER; note = N1-methylpseudouracil
  modified_base 4220: mod_base = OTHER; note = N1-methylpseudouracil
  modified_base 4223: mod_base = OTHER; note = N1-methylpseudouracil
  modified_base 4226: mod_base = OTHER; note = N1-methylpseudouracil
  modified_base 4229: mod_base = OTHER; note = N1-methylpseudouracil
  modified_base 4244: mod_base = OTHER; note = N1-methylpseudouracil
  modified_base 4252: mod_base = OTHER; note = N1-methylpseudouracil
  modified_base 4258: mod_base = OTHER; note = N1-methylpseudouracil
  modified_base 4262: mod_base = OTHER; note = N1-methylpseudouracil
  modified_base 4271: mod_base = OTHER; note = N1-methylpseudouracil
  modified_base 4274: mod_base = OTHER; note = N1-methylpseudouracil
  modified_base 4289: mod_base = OTHER; note = N1-methylpseudouracil
  modified_base 4291: mod_base = OTHER; note = N1-methylpseudouracil
  modified_base 4292: mod_base = OTHER; note = N1-methylpseudouracil
  modified_base 4302: mod_base = OTHER; note = N1-methylpseudouracil
  modified_base 4304: mod_base = OTHER; note = N1-methylpseudouracil
  modified_base 4306: mod_base = OTHER; note = N1-methylpseudouracil
  modified_base 4308: mod_base = OTHER; note = N1-methylpseudouracil
  modified_base 4317: mod_base = OTHER; note = N1-methylpseudouracil
  modified_base 4322: mod_base = OTHER; note = N1-methylpseudouracil
  modified_base 4328: mod_base = OTHER; note = N1-methylpseudouracil
  modified_base 4330: mod_base = OTHER; note = N1-methylpseudouracil
  modified_base 4331: mod_base = OTHER; note = N1-methylpseudouracil
  modified_base 4335: mod_base = OTHER; note = N1-methylpseudouracil
  modified_base 4354: mod_base = OTHER; note = N1-methylpseudouracil
  modified_base 4360: mod_base = OTHER; note = N1-methylpseudouracil
  modified_base 4362: mod_base = OTHER; note = N1-methylpseudouracil
  modified_base 4373: mod_base = OTHER; note = N1-methylpseudouracil
  modified_base 4382: mod_base = OTHER; note = N1-methylpseudouracil
  modified_base 4406: mod_base = OTHER; note = N1-methylpseudouracil
  modified_base 4413: mod_base = OTHER; note = N1-methylpseudouracil
  modified_base 4421: mod_base = OTHER; note = N1-methylpseudouracil
  modified_base 4423: mod_base = OTHER; note = N1-methylpseudouracil
  modified_base 4429: mod_base = OTHER; note = N1-methylpseudouracil
  modified_base 4441: mod_base = OTHER; note = N1-methylpseudouracil
  modified_base 4445: mod_base = OTHER; note = N1-methylpseudouracil
  modified_base 4450: mod_base = OTHER; note = N1-methylpseudouracil
  modified_base 4454: mod_base = OTHER; note = N1-methylpseudouracil
  modified_base 4455: mod_base = OTHER; note = N1-methylpseudouracil
  modified_base 4457: mod_base = OTHER; note = N1-methylpseudouracil
  modified_base 4458: mod_base = OTHER; note = N1-methylpseudouracil
  modified_base 4464: mod_base = OTHER; note = N1-methylpseudouracil
  modified_base 4465: mod_base = OTHER; note = N1-methylpseudouracil
  modified_base 4471: mod_base = OTHER; note = N1-methylpseudouracil
  modified_base 4484: mod_base = OTHER; note = N1-methylpseudouracil
  modified_base 4487: mod_base = OTHER; note = N1-methylpseudouracil
  modified_base 4492: mod_base = OTHER; note = N1-methylpseudouracil
  modified_base 4493: mod_base = OTHER; note = N1-methylpseudouracil
  modified_base 4496: mod_base = OTHER; note = N1-methylpseudouracil
  modified_base 4504: mod_base = OTHER; note = N1-methylpseudouracil
  modified_base 4512: mod_base = OTHER; note = N1-methylpseudouracil
  modified_base 4515: mod_base = OTHER; note = N1-methylpseudouracil
  modified_base 4517: mod_base = OTHER; note = N1-methylpseudouracil
  modified_base 4518: mod_base = OTHER; note = N1-methylpseudouracil
  modified_base 4519: mod_base = OTHER; note = N1-methylpseudouracil
  modified_base 4523: mod_base = OTHER; note = N1-methylpseudouracil
  modified_base 4528: mod_base = OTHER; note = N1-methylpseudouracil
  modified_base 4530: mod_base = OTHER; note = N1-methylpseudouracil
  modified_base 4534: mod_base = OTHER; note = N1-methylpseudouracil
ggaggaaatcgcaaaatttgctcttcgcgttagatttcttttagttttctcgcaactagcaagctttttgttctcgccatgcagcggagccctctggagaaggccagcgtggtgagcaagctgttcttcagctggaccaggcccatcctgcgaaagggctacagacagaggctggagctgtccgacatctaccagattccatccgtggacagcgccgacaatctgagcgagaagctggagagggagtgggaccgcgagctggccagcaagaagaaccctaagctgatcaacgccctgcgccgctgcttcttctggaggttcatgttctacggcatcttcctgtacctgggcgaggtgaccaaggccgtccagcctctgctgctgggccgcatcatcgccagctacgatcccgacaacaaggaggaacgctccatcgccatctacctgggcatcggcctgtgtctgctgttcatcgtgcggaccctgctgctgcaccccgccatcttcggcctgcatcacatcggcatgcagatgaggatcgccatgttctccctgatctacaagaagaccctgaagctgtccagccgcgtgctggataagatcagcatcgggcagctggtgagcctgctgagcaacaacctgaacaagttcgacgaggggttggcgctggcccacttcgtgtggattgccccgctgcaggtggctctgctgatggggctgatctgggagctgctgcaggcctctgccttctgcgggctggggtttctgatcgtgctggccctgttccaagctggcctgggccgcatgatgatgaagtaccgcgatcagagggccggcaagatcagcgagcgcctggtgatcactagcgagatgatagagaacatccagagcgtgaaggcttactgttgggaggaggccatggagaagatgatcgagaacctgaggcagaccgagctgaagctgactagaaaggcagcctacgtgaggtatttcaactccagcgccttcttcttcagcggcttcttcgtggtgttcctgagcgtgctgccctacgccctgatcaagggcatcatcctgaggaagatcttcaccaccattagcttctgcatcgtgctgcgcatggccgtgaccaggcagttcccttgggccgtgcagacttggtacgacagcctgggagccatcaacaagatccaggactttctgcagaagcaggaatataagaccctggagtacaacctgaccaccaccgaggtggtgatggagaacgtgaccgccttctgggaggagctgggcacccctgtgctgaaggacatcaacttcaagatcgaaagaggccaactgctggccgtggccggatctaccggcgccggcaagaccagcctgctgatgatgatcatgggcgagctggagcccagcgagggcaagatcaagcacagcggccggatctccttctgcccacagttctcctggatcatgcccggcaccatcaaggagaacatcatcttcggcgtgagctacgacgagtacaggtaccggagcgtgatcaaggcctgccagctggaggaggacatctccaaatttcccgagaaggacaacaccgtgctgggcgaaggcgggatcaccctgtccggtggccagcgtgcacgcatctccctggcccgggctgtgtacaaggacgccgacctgtacctgctggacagcccttttggctacctggacgtgctgaccgagaaggagatcttcgagtcctgcgtgtgtaagctgatggccaacaagaccagaatcctggtgaccagcaagatggagcatctgaagaaggccgacaagatcctgatcctgcacgaggggtccagctacttctacggcaccttcagcgagctgcagaacctgcagcccgacttcagctccaagctgatgggctgcgatagcttcgaccagttctccgccgagagaaggaactccattctgaccgagaccctgcaccgattctccctggagggagacgccccagtgagctggaccgagaccaagaagcagagcttcaagcagaccggcgagttcggagagaagcgcaagaactccatcctcaaccccatcaacagcatccggaagttcagcatcgtgcagaagacccctctgcagatgaacgggatcgaggaggacagcgacgagcccctggaacggcgactgtccctcgtgcccgacagcgagcagggcgaggccatcctgccccggatctccgtgatctccactgggcccaccctgcaagcccgacggcggcaaagcgtgctgaacctgatgacccacagcgtgaaccagggccagaatatccaccgcaagactacagccagcacccgcaaggtgagcctggctccccaggccaacctgaccgagctggacatctacagcaggaggctgagccaggagacaggcctggagatcagcgaggagatcaacgaggaggacctgaaggagtgcttcttcgacgacatggagtccatccccgccgtgaccacctggaacacctacctgagatacatcaccgtgcacaagagcctgatcttcgtgctgatctggtgcctggtgatcttcttggccgaggtagccgcctcactggtggtgctgtggctgctgggcaataccccactgcaggacaaggggaactccacccacagccggaacaacagctacgccgtgatcatcacctccaccagcagctactacgtgttctacatctacgtgggcgtggccgacacactgctggccatgggcttcttcagaggcctccctctggtgcacacactgatcaccgtgagcaagatcctgcaccacaagatgctgcacagcgtgctgcaggctcccatgtcaaccctgaacaccctgaaggccggcggcatcctgaacaggttcagcaaggacatcgccattctggacgatctgctgcccctgaccatcttcgacttcatccagctgctgctgatcgtgatcggggccatcgccgtggtggccgtgctgcagccctacatcttcgtggccacagtgcccgtgatcgtggccttcatcatgctgcgcgcctacttcctgcagacctcccagcagctgaagcagctggagagcgaaggccgcagccccatcttcacccacctggtgactagcctgaaggggctgtggaccctgcgcgccttcggcaggcagccctacttcgagaccctgttccacaaggctctgaacctgcacaccgccaactggttcctgtacctcagcaccctgcgctggttccagatgcggatcgagatgatcttcgtgatcttcttcatcgccgtgaccttcatctccatcctgaccaccggggaaggcgagggacgggtgggaatcatcctgaccctggccatgaatatcatgagcaccctgcagtgggccgtgaacagcagcatcgacgtggacagcctgatgcggtccgtgtcccgggtgttcaagttcatcgacatgcccaccgagggcaagcccaccaagagcaccaagccctacaagaacggccagctgagcaaggtgatgattatcgagaacagccacgtgaagaaggacgacatctggccttccggcggccagatgaccgtgaaggacctgaccgccaagtacaccgagggcggcaacgccatcctggagaacatcagcttctccattagccctggacagcgggtgggcctgttgggacggaccggcagtgggaagagcaccctgctgtccgccttcctgcggctgctgaacacggagggcgagatccagatcgacggggtgagctgggacagcatcaccctgcagcagtggcgaaaggccttcggcgtgatcccacagaaggtgtttattttctctggcacctttaggaagaacctggacccctacgagcagtggtccgaccaggagatctggaaggtggccgacgaggtgggcctgcggtcagtgatcgagcagttccccggcaagctggacttcgtgctggtggacggcggctgcgtgctgagccacggccacaagcagctgatgtgcctggcacgcagcgtgctgagcaaggccaagatcctgctgctggacgagccctccgcgcacctggatcccgtgacctaccagatcatcaggcggaccctgaagcaggccttcgccgactgcaccgtgatcctgtgcgagagcagaatcgaggctatgctggagtgccagcagttcctggtgatcgaggagaacaaggtgcggcagtacgactccatccagaagctgctgaacgagcgcagcctgttcagacaggctatctctcccagcgatcgcgtgaagctgttccctcacaggaacagcagcaagtgcaagtctaagccacagatcgccgccctgaaggaggagaccgaggaggaggtgcaggatacccgcctgtaaagctccccgggggcctcggtggcctagcttcttgccccttgggcctccccccagcccctcctccccttcctgcacccgtacccccgtggtctttgaataaagtctgagtgggcggcaaaaaaaaaaaaaaaaaaaaaaaaaaaaaaaaaaaaaaaaaaaaaaaaaaaaaaaaaaaaaaaaaaaaaaaaaaaaaaaaaaaaaaaaaaaaaaaaaaaa

SEQ ID NO: 19 - RNA, 4756 nt, synthetic construct
  source 1..4756: mol_type = other RNA
  modified_base 1: mod_base = OTHER; note = 7-Methylguanosine with triphosphate linkage
  modified_base 2: mod_base = OTHER; note = 2'-O-methyl modified nucleotide
  modified_base 9: mod_base = OTHER; note = N1-methylpseudouracil
  modified_base 10: mod_base = OTHER; note = N1-methylpseudouracil
  modified_base 11: mod_base = OTHER; note = N1-methylpseudouracil
  modified_base 12: mod_base = OTHER; note = N1-methylpseudouracil
  modified_base 13: mod_base = OTHER; note = N1-methylpseudouracil
  modified_base 14: mod_base = OTHER; note = N1-methylpseudouracil
  modified_base 15: mod_base = OTHER; note = N1-methylpseudouracil
  modified_base 16: mod_base = OTHER; note = N1-methylpseudouracil
  modified_base 17: mod_base = OTHER; note = N1-methylpseudouracil
  modified_base 20: mod_base = OTHER; note = N1-methylpseudouracil
  modified_base 22: mod_base = OTHER; note = N1-methylpseudouracil
  modified_base 23: mod_base = OTHER; note = N1-methylpseudouracil
  modified_base 25: mod_base = OTHER; note = N1-methylpseudouracil
  modified_base 31: mod_base = OTHER; note = N1-methylpseudouracil
  modified_base 32: mod_base = OTHER; note = N1-methylpseudouracil
  modified_base 33: mod_base = OTHER; note = N1-methylpseudouracil
  modified_base 34: mod_base = OTHER; note = N1-methylpseudouracil
  modified_base 35: mod_base = OTHER; note = N1-methylpseudouracil
  modified_base 36: mod_base = OTHER; note = N1-methylpseudouracil
  modified_base 37: mod_base = OTHER; note = N1-methylpseudouracil
  modified_base 38: mod_base = OTHER; note = N1-methylpseudouracil
  modified_base 39: mod_base = OTHER; note = N1-methylpseudouracil
  modified_base 42: mod_base = OTHER; note = N1-methylpseudouracil
  modified_base 44: mod_base = OTHER; note = N1-methylpseudouracil
  modified_base 45: mod_base = OTHER; note = N1-methylpseudouracil
  modified_base 53: mod_base = OTHER; note = N1-methylpseudouracil
  modified_base 54: mod_base = OTHER; note = N1-methylpseudouracil
  modified_base 55: mod_base = OTHER; note = N1-methylpseudouracil
  modified_base 56: mod_base = OTHER; note = N1-methylpseudouracil
  modified_base 57: mod_base = OTHER; note = N1-methylpseudouracil
  modified_base 58: mod_base = OTHER; note = N1-methylpseudouracil
  modified_base 59: mod_base = OTHER; note = N1-methylpseudouracil
  modified_base 60: mod_base = OTHER; note = N1-methylpseudouracil
  modified_base 61: mod_base = OTHER; note = N1-methylpseudouracil
  modified_base 64: mod_base = OTHER; note = N1-methylpseudouracil
  modified_base 66: mod_base = OTHER; note = N1-methylpseudouracil
  modified_base 67: mod_base = OTHER; note = N1-methylpseudouracil
  modified_base 75: mod_base = OTHER; note = N1-methylpseudouracil
  modified_base 85: mod_base = OTHER; note = N1-methylpseudouracil
  modified_base 87: mod_base = OTHER; note = N1-methylpseudouracil
  modified_base 109: mod_base = OTHER; note = N1-methylpseudouracil
  modified_base 119: mod_base = OTHER; note = N1-methylpseudouracil
  modified_base 123: mod_base = OTHER; note = N1-methylpseudouracil
  modified_base 124: mod_base = OTHER; note = N1-methylpseudouracil
  modified_base 135: mod_base = OTHER; note = N1-methylpseudouracil
  modified_base 139: mod_base = OTHER; note = N1-methylpseudouracil
  modified_base 140: mod_base = OTHER; note = N1-methylpseudouracil
  modified_base 142: mod_base = OTHER; note = N1-methylpseudouracil
  modified_base 151: mod_base = OTHER; note = N1-methylpseudouracil
  modified_base 153: mod_base = OTHER; note = N1-methylpseudouracil
  modified_base 154: mod_base = OTHER; note = N1-methylpseudouracil
  modified_base 156: mod_base = OTHER; note = N1-methylpseudouracil
  modified_base 157: mod_base = OTHER; note = N1-methylpseudouracil
  modified_base 162: mod_base = OTHER; note = N1-methylpseudouracil
  modified_base 175: mod_base = OTHER; note = N1-methylpseudouracil
  modified_base 178: mod_base = OTHER; note = N1-methylpseudouracil
  modified_base 189: mod_base = OTHER; note = N1-methylpseudouracil
  modified_base 202: mod_base = OTHER; note = N1-methylpseudouracil
  modified_base 208: mod_base = OTHER; note = N1-methylpseudouracil
  modified_base 210: mod_base = OTHER; note = N1-methylpseudouracil
  modified_base 217: mod_base = OTHER; note = N1-methylpseudouracil
  modified_base 219: mod_base = OTHER; note = N1-methylpseudouracil
  modified_base 226: mod_base = OTHER; note = N1-methylpseudouracil
  modified_base 227: mod_base = OTHER; note = N1-methylpseudouracil
  modified_base 231: mod_base = OTHER; note = N1-methylpseudouracil
  modified_base 235: mod_base = OTHER; note = N1-methylpseudouracil
  modified_base 251: mod_base = OTHER; note = N1-methylpseudouracil
  modified_base 253: mod_base = OTHER; note = N1-methylpseudouracil
  modified_base 265: mod_base = OTHER; note = N1-methylpseudouracil
  modified_base 276: mod_base = OTHER; note = N1-methylpseudouracil
  modified_base 289: mod_base = OTHER; note = N1-methylpseudouracil
  modified_base 308: mod_base = OTHER; note = N1-methylpseudouracil
  modified_base 313: mod_base = OTHER; note = N1-methylpseudouracil
  modified_base 316: mod_base = OTHER; note = N1-methylpseudouracil
  modified_base 325: mod_base = OTHER; note = N1-methylpseudouracil
  modified_base 333: mod_base = OTHER; note = N1-methylpseudouracil
  modified_base 336: mod_base = OTHER; note = N1-methylpseudouracil
  modified_base 337: mod_base = OTHER; note = N1-methylpseudouracil
  modified_base 339: mod_base = OTHER; note = N1-methylpseudouracil
  modified_base 340: mod_base = OTHER; note = N1-methylpseudouracil
  modified_base 342: mod_base = OTHER; note = N1-methylpseudouracil
  modified_base 348: mod_base = OTHER; note = N1-methylpseudouracil
  modified_base 349: mod_base = OTHER; note = N1-methylpseudouracil
  modified_base 352: mod_base = OTHER; note = N1-methylpseudouracil
  modified_base 354: mod_base = OTHER; note = N1-methylpseudouracil
  modified_base 355: mod_base = OTHER; note = N1-methylpseudouracil
  modified_base 357: mod_base = OTHER; note = N1-methylpseudouracil
  modified_base 364: mod_base = OTHER; note = N1-methylpseudouracil
  modified_base 366: mod_base = OTHER; note = N1-methylpseudouracil
  modified_base 367: mod_base = OTHER; note = N1-methylpseudouracil
  modified_base 370: mod_base = OTHER; note = N1-methylpseudouracil
  modified_base 372: mod_base = OTHER; note = N1-methylpseudouracil
  modified_base 376: mod_base = OTHER; note = N1-methylpseudouracil
  modified_base 385: mod_base = OTHER; note = N1-methylpseudouracil
  modified_base 397: mod_base = OTHER; note = N1-methylpseudouracil
  modified_base 404: mod_base = OTHER; note = N1-methylpseudouracil
  modified_base 406: mod_base = OTHER; note = N1-methylpseudouracil
  modified_base 409: mod_base = OTHER; note = N1-methylpseudouracil
  modified_base 412: mod_base = OTHER; note = N1-methylpseudouracil
  modified_base 421: mod_base = OTHER; note = N1-methylpseudouracil
  modified_base 424: mod_base = OTHER; note = N1-methylpseudouracil
  modified_base 432: mod_base = OTHER; note = N1-methylpseudouracil
  modified_base 437: mod_base = OTHER; note = N1-methylpseudouracil
  modified_base 459: mod_base = OTHER; note = N1-methylpseudouracil
  modified_base 463: mod_base = OTHER; note = N1-methylpseudouracil
  modified_base 469: mod_base = OTHER; note = N1-methylpseudouracil
  modified_base 471: mod_base = OTHER; note = N1-methylpseudouracil
  modified_base 475: mod_base = OTHER; note = N1-methylpseudouracil
  modified_base 481: mod_base = OTHER; note = N1-methylpseudouracil
  modified_base 487: mod_base = OTHER; note = N1-methylpseudouracil
  modified_base 489: mod_base = OTHER; note = N1-methylpseudouracil
  modified_base 491: mod_base = OTHER; note = N1-methylpseudouracil
  modified_base 493: mod_base = OTHER; note = N1-methylpseudouracil
  modified_base 496: mod_base = OTHER; note = N1-methylpseudouracil
  modified_base 498: mod_base = OTHER; note = N1-methylpseudouracil
  modified_base 499: mod_base = OTHER; note = N1-methylpseudouracil
  modified_base 502: mod_base = OTHER; note = N1-methylpseudouracil
  modified_base 505: mod_base = OTHER; note = N1-methylpseudouracil
  modified_base 514: mod_base = OTHER; note = N1-methylpseudouracil
  modified_base 517: mod_base = OTHER; note = N1-methylpseudouracil
  modified_base 520: mod_base = OTHER; note = N1-methylpseudouracil
  modified_base 532: mod_base = OTHER; note = N1-methylpseudouracil
  modified_base 534: mod_base = OTHER; note = N1-methylpseudouracil
  modified_base 535: mod_base = OTHER; note = N1-methylpseudouracil
  modified_base 541: mod_base = OTHER; note = N1-methylpseudouracil
  modified_base 545: mod_base = OTHER; note = N1-methylpseudouracil
  modified_base 550: mod_base = OTHER; note = N1-methylpseudouracil
  modified_base 556: mod_base = OTHER; note = N1-methylpseudouracil
  modified_base 562: mod_base = OTHER; note = N1-methylpseudouracil
  modified_base 568: mod_base = OTHER; note = N1-methylpseudouracil
  modified_base 574: mod_base = OTHER; note = N1-methylpseudouracil
  modified_base 576: mod_base = OTHER; note = N1-methylpseudouracil
  modified_base 577: mod_base = OTHER; note = N1-methylpseudouracil
  modified_base 579: mod_base = OTHER; note = N1-methylpseudouracil
  modified_base 583: mod_base = OTHER; note = N1-methylpseudouracil
  modified_base 586: mod_base = OTHER; note = N1-methylpseudouracil
  modified_base 588: mod_base = OTHER; note = N1-methylpseudouracil
  modified_base 601: mod_base = OTHER; note = N1-methylpseudouracil
  modified_base 607: mod_base = OTHER; note = N1-methylpseudouracil
  modified_base 609: mod_base = OTHER; note = N1-methylpseudouracil
  modified_base 619: mod_base = OTHER; note = N1-methylpseudouracil
  modified_base 622: mod_base = OTHER; note = N1-methylpseudouracil
  modified_base 626: mod_base = OTHER; note = N1-methylpseudouracil
  modified_base 631: mod_base = OTHER; note = N1-methylpseudouracil
  modified_base 637: mod_base = OTHER; note = N1-methylpseudouracil
  modified_base 646: mod_base = OTHER; note = N1-methylpseudouracil
  modified_base 649: mod_base = OTHER; note = N1-methylpseudouracil
  modified_base 655: mod_base = OTHER; note = N1-methylpseudouracil
  modified_base 658: mod_base = OTHER; note = N1-methylpseudouracil
  modified_base 670: mod_base = OTHER; note = N1-methylpseudouracil
  modified_base 678: mod_base = OTHER; note = N1-methylpseudouracil
  modified_base 679: mod_base = OTHER; note = N1-methylpseudouracil
  modified_base 690: mod_base = OTHER; note = N1-methylpseudouracil
  modified_base 691: mod_base = OTHER; note = N1-methylpseudouracil
  modified_base 697: mod_base = OTHER; note = N1-methylpseudouracil
  modified_base 705: mod_base = OTHER; note = N1-methylpseudouracil
  modified_base 706: mod_base = OTHER; note = N1-methylpseudouracil
  modified_base 709: mod_base = OTHER; note = N1-methylpseudouracil
  modified_base 711: mod_base = OTHER; note = N1-methylpseudouracil
  modified_base 715: mod_base = OTHER; note = N1-methylpseudouracil
  modified_base 716: mod_base = OTHER; note = N1-methylpseudouracil
  modified_base 724: mod_base = OTHER; note = N1-methylpseudouracil
  modified_base 730: mod_base = OTHER; note = N1-methylpseudouracil
  modified_base 734: mod_base = OTHER; note = N1-methylpseudouracil
  modified_base 736: mod_base = OTHER; note = N1-methylpseudouracil
  modified_base 739: mod_base = OTHER; note = N1-methylpseudouracil
  modified_base 742: mod_base = OTHER; note = N1-methylpseudouracil
  modified_base 748: mod_base = OTHER; note = N1-methylpseudouracil
  modified_base 751: mod_base = OTHER; note = N1-methylpseudouracil
  modified_base 753: mod_base = OTHER; note = N1-methylpseudouracil
  modified_base 760: mod_base = OTHER; note = N1-methylpseudouracil
  modified_base 763: mod_base = OTHER; note = N1-methylpseudouracil
  modified_base 771: mod_base = OTHER; note = N1-methylpseudouracil
  modified_base 773: mod_base = OTHER; note = N1-methylpseudouracil
  modified_base 777: mod_base = OTHER; note = N1-methylpseudouracil
  modified_base 778: mod_base = OTHER; note = N1-methylpseudouracil
  modified_base 780: mod_base = OTHER; note = N1-methylpseudouracil
  modified_base 787: mod_base = OTHER; note = N1-methylpseudouracil
  modified_base 792: mod_base = OTHER; note = N1-methylpseudouracil
  modified_base 793: mod_base = OTHER; note = N1-methylpseudouracil
  modified_base 794: mod_base = OTHER; note = N1-methylpseudouracil
  modified_base 796: mod_base = OTHER; note = N1-methylpseudouracil
  modified_base 799: mod_base = OTHER; note = N1-methylpseudouracil
  modified_base 802: mod_base = OTHER; note = N1-methylpseudouracil
  modified_base 805: mod_base = OTHER; note = N1-methylpseudouracil
  modified_base 811: mod_base = OTHER; note = N1-methylpseudouracil
  modified_base 813: mod_base = OTHER; note = N1-methylpseudouracil
  modified_base 814: mod_base = OTHER; note = N1-methylpseudouracil
  modified_base 821: mod_base = OTHER; note = N1-methylpseudouracil
  modified_base 826: mod_base = OTHER; note = N1-methylpseudouracil
  modified_base 835: mod_base = OTHER; note = N1-methylpseudouracil
  modified_base 838: mod_base = OTHER; note = N1-methylpseudouracil
  modified_base 841: mod_base = OTHER; note = N1-methylpseudouracil
  modified_base 846: mod_base = OTHER; note = N1-methylpseudouracil
  modified_base 854: mod_base = OTHER; note = N1-methylpseudouracil
  modified_base 871: mod_base = OTHER; note = N1-methylpseudouracil
  modified_base 883: mod_base = OTHER; note = N1-methylpseudouracil
  modified_base 886: mod_base = OTHER; note = N1-methylpseudouracil
  modified_base 889: mod_base = OTHER; note = N1-methylpseudouracil
  modified_base 893: mod_base = OTHER; note = N1-methylpseudouracil
  modified_base 901: mod_base = OTHER; note = N1-methylpseudouracil
  modified_base 904: mod_base = OTHER; note = N1-methylpseudouracil
  modified_base 913: mod_base = OTHER; note = N1-methylpseudouracil
  modified_base 922: mod_base = OTHER; note = N1-methylpseudouracil
  modified_base 929: mod_base = OTHER; note = N1-methylpseudouracil
  modified_base 930: mod_base = OTHER; note = N1-methylpseudouracil
  modified_base 933: mod_base = OTHER; note = N1-methylpseudouracil
  modified_base 935: mod_base = OTHER; note = N1-methylpseudouracil
  modified_base 936: mod_base = OTHER; note = N1-methylpseudouracil
  modified_base 949: mod_base = OTHER; note = N1-methylpseudouracil
  modified_base 958: mod_base = OTHER; note = N1-methylpseudouracil
  modified_base 961: mod_base = OTHER; note = N1-methylpseudouracil
  modified_base 970: mod_base = OTHER; note = N1-methylpseudouracil
  modified_base 985: mod_base = OTHER; note = N1-methylpseudouracil
  modified_base 991: mod_base = OTHER; note = N1-methylpseudouracil
  modified_base 995: mod_base = OTHER; note = N1-methylpseudouracil
  modified_base 1008: mod_base = OTHER; note = N1-methylpseudouracil
  modified_base 1012: mod_base = OTHER; note = N1-methylpseudouracil
  modified_base 1017: mod_base = OTHER; note = N1-methylpseudouracil
  modified_base 1019: mod_base = OTHER; note = N1-methylpseudouracil
  modified_base 1020: mod_base = OTHER; note = N1-methylpseudouracil
  modified_base 1021: mod_base = OTHER; note = N1-methylpseudouracil
  modified_base 1026: mod_base = OTHER; note = N1-methylpseudouracil
  modified_base 1035: mod_base = OTHER; note = N1-methylpseudouracil
  modified_base 1036: mod_base = OTHER; note = N1-methylpseudouracil
  modified_base 1038: mod_base = OTHER; note = N1-methylpseudouracil
  modified_base 1039: mod_base = OTHER; note = N1-methylpseudouracil
  modified_base 1041: mod_base = OTHER; note = N1-methylpseudouracil
  modified_base 1042: mod_base = OTHER; note = N1-methylpseudouracil
  modified_base 1050: mod_base = OTHER; note = N1-methylpseudouracil
  modified_base 1051: mod_base = OTHER; note = N1-methylpseudouracil
  modified_base 1053: mod_base = OTHER; note = N1-methylpseudouracil
  modified_base 1054: mod_base = OTHER; note = N1-methylpseudouracil
  modified_base 1057: mod_base = OTHER; note = N1-methylpseudouracil
  modified_base 1060: mod_base = OTHER; note = N1-methylpseudouracil
  modified_base 1062: mod_base = OTHER; note = N1-methylpseudouracil
  modified_base 1063: mod_base = OTHER; note = N1-methylpseudouracil
  modified_base 1066: mod_base = OTHER; note = N1-methylpseudouracil
  modified_base 1072: mod_base = OTHER; note = N1-methylpseudouracil
  modified_base 1075: mod_base = OTHER; note = N1-methylpseudouracil
  modified_base 1080: mod_base = OTHER; note = N1-methylpseudouracil
  modified_base 1087: mod_base = OTHER; note = N1-methylpseudouracil
  modified_base 1090: mod_base = OTHER; note = N1-methylpseudouracil
  modified_base 1099: mod_base = OTHER; note = N1-methylpseudouracil
  modified_base 1102: mod_base = OTHER; note = N1-methylpseudouracil
  modified_base 1105: mod_base = OTHER; note = N1-methylpseudouracil
  modified_base 1114: mod_base = OTHER; note = N1-methylpseudouracil
  modified_base 1116: mod_base = OTHER; note = N1-methylpseudouracil
  modified_base 1117: mod_base = OTHER; note = N1-methylpseudouracil
  modified_base 1126: mod_base = OTHER; note = N1-methylpseudouracil
  modified_base 1127: mod_base = OTHER; note = N1-methylpseudouracil
  modified_base 1131: mod_base = OTHER; note = N1-methylpseudouracil
  modified_base 1132: mod_base = OTHER; note = N1-methylpseudouracil
  modified_base 1134: mod_base = OTHER; note = N1-methylpseudouracil
  modified_base 1138: mod_base = OTHER; note = N1-methylpseudouracil
  modified_base 1141: mod_base = OTHER; note = N1-methylpseudouracil
  modified_base 1144: mod_base = OTHER; note = N1-methylpseudouracil
  modified_base 1150: mod_base = OTHER; note = N1-methylpseudouracil
  modified_base 1156: mod_base = OTHER; note = N1-methylpseudouracil
  modified_base 1167: mod_base = OTHER; note = N1-methylpseudouracil
  modified_base 1168: mod_base = OTHER; note = N1-methylpseudouracil
  modified_base 1172: mod_base = OTHER; note = N1-methylpseudouracil
  modified_base 1173: mod_base = OTHER; note = N1-methylpseudouracil
  modified_base 1180: mod_base = OTHER; note = N1-methylpseudouracil
  modified_base 1187: mod_base = OTHER; note = N1-methylpseudouracil
  modified_base 1188: mod_base = OTHER; note = N1-methylpseudouracil
  modified_base 1191: mod_base = OTHER; note = N1-methylpseudouracil
  modified_base 1201: mod_base = OTHER; note = N1-methylpseudouracil
  modified_base 1210: mod_base = OTHER; note = N1-methylpseudouracil
  modified_base 1219: mod_base = OTHER; note = N1-methylpseudouracil
  modified_base 1227: mod_base = OTHER; note = N1-methylpseudouracil
  modified_base 1228: mod_base = OTHER; note = N1-methylpseudouracil
  modified_base 1229: mod_base = OTHER; note = N1-methylpseudouracil
  modified_base 1231: mod_base = OTHER; note = N1-methylpseudouracil
  modified_base 1245: mod_base = OTHER; note = N1-methylpseudouracil
  modified_base 1247: mod_base = OTHER; note = N1-methylpseudouracil
  modified_base 1255: mod_base = OTHER; note = N1-methylpseudouracil
  modified_base 1260: mod_base = OTHER; note = N1-methylpseudouracil
  modified_base 1267: mod_base = OTHER; note = N1-methylpseudouracil
  modified_base 1282: mod_base = OTHER; note = N1-methylpseudouracil
  modified_base 1285: mod_base = OTHER; note = N1-methylpseudouracil
  modified_base 1288: mod_base = OTHER; note = N1-methylpseudouracil
  modified_base 1297: mod_base = OTHER; note = N1-methylpseudouracil
  modified_base 1305: mod_base = OTHER; note = N1-methylpseudouracil
  modified_base 1306: mod_base = OTHER; note = N1-methylpseudouracil
  modified_base 1308: mod_base = OTHER; note = N1-methylpseudouracil
  modified_base 1320: mod_base = OTHER; note = N1-methylpseudouracil
  modified_base 1321: mod_base = OTHER; note = N1-methylpseudouracil
  modified_base 1330: mod_base = OTHER; note = N1-methylpseudouracil
  modified_base 1332: mod_base = OTHER; note = N1-methylpseudouracil
  modified_base 1333: mod_base = OTHER; note = N1-methylpseudouracil
  modified_base 1355: mod_base = OTHER; note = N1-methylpseudouracil
  modified_base 1386: mod_base = OTHER; note = N1-methylpseudouracil
  modified_base 1390: mod_base = OTHER; note = N1-methylpseudouracil
  modified_base 1392: mod_base = OTHER; note = N1-methylpseudouracil
  modified_base 1393: mod_base = OTHER; note = N1-methylpseudouracil
  modified_base 1395: mod_base = OTHER; note = N1-methylpseudouracil
  modified_base 1396: mod_base = OTHER; note = N1-methylpseudouracil
  modified_base 1404: mod_base = OTHER; note = N1-methylpseudouracil
  modified_base 1405: mod_base = OTHER; note = N1-methylpseudouracil
  modified_base 1406: mod_base = OTHER; note = N1-methylpseudouracil
  modified_base 1411: mod_base = OTHER; note = N1-methylpseudouracil
  modified_base 1414: mod_base = OTHER; note = N1-methylpseudouracil
  modified_base 1424: mod_base = OTHER; note = N1-methylpseudouracil
  modified_base 1426: mod_base = OTHER; note = N1-methylpseudouracil
  modified_base 1429: mod_base = OTHER; note = N1-methylpseudouracil
  modified_base 1438: mod_base = OTHER; note = N1-methylpseudouracil
  modified_base 1443: mod_base = OTHER; note = N1-methylpseudouracil
  modified_base 1444: mod_base = OTHER; note = N1-methylpseudouracil
  modified_base 1450: mod_base = OTHER; note = N1-methylpseudouracil
  modified_base 1465: mod_base = OTHER; note = N1-methylpseudouracil
  modified_base 1468: mod_base = OTHER; note = N1-methylpseudouracil
  modified_base 1474: mod_base = OTHER; note = N1-methylpseudouracil
  modified_base 1482: mod_base = OTHER; note = N1-methylpseudouracil
  modified_base 1484: mod_base = OTHER; note = N1-methylpseudouracil
  modified_base 1507: mod_base = OTHER; note = N1-methylpseudouracil
  modified_base 1510: mod_base = OTHER; note = N1-methylpseudouracil
  modified_base 1513: mod_base = OTHER; note = N1-methylpseudouracil
  modified_base 1516: mod_base = OTHER; note = N1-methylpseudouracil
  modified_base 1519: mod_base = OTHER; note = N1-methylpseudouracil
  modified_base 1522: mod_base = OTHER; note = N1-methylpseudouracil
  modified_base 1531: mod_base = OTHER; note = N1-methylpseudouracil
  modified_base 1552: mod_base = OTHER; note = N1-methylpseudouracil
  modified_base 1570: mod_base = OTHER; note = N1-methylpseudouracil
  modified_base 1572: mod_base = OTHER; note = N1-methylpseudouracil
  modified_base 1575: mod_base = OTHER; note = N1-methylpseudouracil
  modified_base 1576: mod_base = OTHER; note = N1-methylpseudouracil
  modified_base 1578: mod_base = OTHER; note = N1-methylpseudouracil
  modified_base 1581: mod_base = OTHER; note = N1-methylpseudouracil
  modified_base 1587: mod_base = OTHER; note = N1-methylpseudouracil
  modified_base 1588: mod_base = OTHER; note = N1-methylpseudouracil
  modified_base 1590: mod_base = OTHER; note = N1-methylpseudouracil
  modified_base 1593: mod_base = OTHER; note = N1-methylpseudouracil
  modified_base 1597: mod_base = OTHER; note = N1-methylpseudouracil
  modified_base 1600: mod_base = OTHER; note = N1-methylpseudouracil
  modified_base 1612: mod_base = OTHER; note = N1-methylpseudouracil
  modified_base 1624: mod_base = OTHER; note = N1-methylpseudouracil
  modified_base 1627: mod_base = OTHER; note = N1-methylpseudouracil
  modified_base 1629: mod_base = OTHER; note = N1-methylpseudouracil
  modified_base 1630: mod_base = OTHER; note = N1-methylpseudouracil
  modified_base 1636: mod_base = OTHER; note = N1-methylpseudouracil
  modified_base 1641: mod_base = OTHER; note = N1-methylpseudouracil
  modified_base 1650: mod_base = OTHER; note = N1-methylpseudouracil
  modified_base 1656: mod_base = OTHER; note = N1-methylpseudouracil
  modified_base 1666: mod_base = OTHER; note = N1-methylpseudouracil
  modified_base 1669: mod_base = OTHER; note = N1-methylpseudouracil
  modified_base 1677: mod_base = OTHER; note = N1-methylpseudouracil
  modified_base 1684: mod_base = OTHER; note = N1-methylpseudouracil
  modified_base 1696: mod_base = OTHER; note = N1-methylpseudouracil
  modified_base 1698: mod_base = OTHER; note = N1-methylpseudouracil
  modified_base 1704: mod_base = OTHER; note = N1-methylpseudouracil
  modified_base 1705: mod_base = OTHER; note = N1-methylpseudouracil
  modified_base 1706: mod_base = OTHER; note = N1-methylpseudouracil
  modified_base 1723: mod_base = OTHER; note = N1-methylpseudouracil
  modified_base 1724: mod_base = OTHER; note = N1-methylpseudouracil
  modified_base 1726: mod_base = OTHER; note = N1-methylpseudouracil
  modified_base 1729: mod_base = OTHER; note = N1-methylpseudouracil
  modified_base 1744: mod_base = OTHER; note = N1-methylpseudouracil
  modified_base 1750: mod_base = OTHER; note = N1-methylpseudouracil
  modified_base 1752: mod_base = OTHER; note = N1-methylpseudouracil
  modified_base 1757: mod_base = OTHER; note = N1-methylpseudouracil
  modified_base 1766: mod_base = OTHER; note = N1-methylpseudouracil
  modified_base 1774: mod_base = OTHER; note = N1-methylpseudouracil
  modified_base 1776: mod_base = OTHER; note = N1-methylpseudouracil
  modified_base 1780: mod_base = OTHER; note = N1-methylpseudouracil
  modified_base 1790: mod_base = OTHER; note = N1-methylpseudouracil
  modified_base 1792: mod_base = OTHER; note = N1-methylpseudouracil
  modified_base 1794: mod_base = OTHER; note = N1-methylpseudouracil
  modified_base 1810: mod_base = OTHER; note = N1-methylpseudouracil
  modified_base 1812: mod_base = OTHER; note = N1-methylpseudouracil
  modified_base 1816: mod_base = OTHER; note = N1-methylpseudouracil
  modified_base 1819: mod_base = OTHER; note = N1-methylpseudouracil
  modified_base 1829: mod_base = OTHER; note = N1-methylpseudouracil
  modified_base 1830: mod_base = OTHER; note = N1-methylpseudouracil
  modified_base 1831: mod_base = OTHER; note = N1-methylpseudouracil
  modified_base 1832: mod_base = OTHER; note = N1-methylpseudouracil
  modified_base 1836: mod_base = OTHER; note = N1-methylpseudouracil
  modified_base 1840: mod_base = OTHER; note = N1-methylpseudouracil
  modified_base 1846: mod_base = OTHER; note = N1-methylpseudouracil
  modified_base 1849: mod_base = OTHER; note = N1-methylpseudouracil
  modified_base 1864: mod_base = OTHER; note = N1-methylpseudouracil
  modified_base 1866: mod_base = OTHER; note = N1-methylpseudouracil
  modified_base 1867: mod_base = OTHER; note = N1-methylpseudouracil
  modified_base 1872: mod_base = OTHER; note = N1-methylpseudouracil
  modified_base 1875: mod_base = OTHER; note = N1-methylpseudouracil
  modified_base 1879: mod_base = OTHER; note = N1-methylpseudouracil
  modified_base 1881: mod_base = OTHER; note = N1-methylpseudouracil
  modified_base 1883: mod_base = OTHER; note = N1-methylpseudouracil
  modified_base 1888: mod_base = OTHER; note = N1-methylpseudouracil
  modified_base 1891: mod_base = OTHER; note = N1-methylpseudouracil
  modified_base 1909: mod_base = OTHER; note = N1-methylpseudouracil
  modified_base 1912: mod_base = OTHER; note = N1-methylpseudouracil
  modified_base 1915: mod_base = OTHER; note = N1-methylpseudouracil
  modified_base 1927: mod_base = OTHER; note = N1-methylpseudouracil
  modified_base 1934: mod_base = OTHER; note = N1-methylpseudouracil
  modified_base 1936: mod_base = OTHER; note = N1-methylpseudouracil
  modified_base 1954: mod_base = OTHER; note = N1-methylpseudouracil
  modified_base 1957: mod_base = OTHER; note = N1-methylpseudouracil
  modified_base 1960: mod_base = OTHER; note = N1-methylpseudouracil
  modified_base 1963: mod_base = OTHER; note = N1-methylpseudouracil
  modified_base 1974: mod_base = OTHER; note = N1-methylpseudouracil
  modified_base 1980: mod_base = OTHER; note = N1-methylpseudouracil
  modified_base 1983: mod_base = OTHER; note = N1-methylpseudouracil
  modified_base 1984: mod_base = OTHER; note = N1-methylpseudouracil
  modified_base 1986: mod_base = OTHER; note = N1-methylpseudouracil
  modified_base 1995: mod_base = OTHER; note = N1-methylpseudouracil
  modified_base 1996: mod_base = OTHER; note = N1-methylpseudouracil
  modified_base 2005: mod_base = OTHER; note = N1-methylpseudouracil
  modified_base 2014: mod_base = OTHER; note = N1-methylpseudouracil
  modified_base 2025: mod_base = OTHER; note = N1-methylpseudouracil
  modified_base 2026: mod_base = OTHER; note = N1-methylpseudouracil
  modified_base 2031: mod_base = OTHER; note = N1-methylpseudouracil
  modified_base 2038: mod_base = OTHER; note = N1-methylpseudouracil
  modified_base 2041: mod_base = OTHER; note = N1-methylpseudouracil
  modified_base 2046: mod_base = OTHER; note = N1-methylpseudouracil
  modified_base 2051: mod_base = OTHER; note = N1-methylpseudouracil
  modified_base 2055: mod_base = OTHER; note = N1-methylpseudouracil
  modified_base 2056: mod_base = OTHER; note = N1-methylpseudouracil
  modified_base 2064: mod_base = OTHER; note = N1-methylpseudouracil
  modified_base 2065: mod_base = OTHER; note = N1-methylpseudouracil
  modified_base 2067: mod_base = OTHER; note = N1-methylpseudouracil
  modified_base 2085: mod_base = OTHER; note = N1-methylpseudouracil
  modified_base 2089: mod_base = OTHER; note = N1-methylpseudouracil
  modified_base 2090: mod_base = OTHER; note = N1-methylpseudouracil
  modified_base 2092: mod_base = OTHER; note = N1-methylpseudouracil
  modified_base 2104: mod_base = OTHER; note = N1-methylpseudouracil
  modified_base 2112: mod_base = OTHER; note = N1-methylpseudouracil
  modified_base 2113: mod_base = OTHER; note = N1-methylpseudouracil
  modified_base 2115: mod_base = OTHER; note = N1-methylpseudouracil
  modified_base 2119: mod_base = OTHER; note = N1-methylpseudouracil
  modified_base 2137: mod_base = OTHER; note = N1-methylpseudouracil
  modified_base 2142: mod_base = OTHER; note = N1-methylpseudouracil
  modified_base 2166: mod_base = OTHER; note = N1-methylpseudouracil
  modified_base 2167: mod_base = OTHER; note = N1-methylpseudouracil
  modified_base 2184: mod_base = OTHER; note = N1-methylpseudouracil
  modified_base 2185: mod_base = OTHER; note = N1-methylpseudouracil
  modified_base 2205: mod_base = OTHER; note = N1-methylpseudouracil
  modified_base 2209: mod_base = OTHER; note = N1-methylpseudouracil
  modified_base 2212: mod_base = OTHER; note = N1-methylpseudouracil
  modified_base 2221: mod_base = OTHER; note = N1-methylpseudouracil
  modified_base 2230: mod_base = OTHER; note = N1-methylpseudouracil
  modified_base 2238: mod_base = OTHER; note = N1-methylpseudouracil
  modified_base 2239: mod_base = OTHER; note = N1-methylpseudouracil
  modified_base 2245: mod_base = OTHER; note = N1-methylpseudouracil
  modified_base 2248: mod_base = OTHER; note = N1-methylpseudouracil
  modified_base 2261: mod_base = OTHER; note = N1-methylpseudouracil
  modified_base 2263: mod_base = OTHER; note = N1-methylpseudouracil
  modified_base 2269: mod_base = OTHER; note = N1-methylpseudouracil
  modified_base 2278: mod_base = OTHER; note = N1-methylpseudouracil
  modified_base 2302: mod_base = OTHER; note = N1-methylpseudouracil
  modified_base 2314: mod_base = OTHER; note = N1-methylpseudouracil
  modified_base 2316: mod_base = OTHER; note = N1-methylpseudouracil
  modified_base 2320: mod_base = OTHER; note = N1-methylpseudouracil
  modified_base 2323: mod_base = OTHER; note = N1-methylpseudouracil
  modified_base 2350: mod_base = OTHER; note = N1-methylpseudouracil
  modified_base 2353: mod_base = OTHER; note = N1-methylpseudouracil
  modified_base 2362: mod_base = OTHER; note = N1-methylpseudouracil
  modified_base 2364: mod_base = OTHER; note = N1-methylpseudouracil
  modified_base 2368: mod_base = OTHER; note = N1-methylpseudouracil
  modified_base 2371: mod_base = OTHER; note = N1-methylpseudouracil
  modified_base 2373: mod_base = OTHER; note = N1-methylpseudouracil
  modified_base 2378: mod_base = OTHER; note = N1-methylpseudouracil
  modified_base 2389: mod_base = OTHER; note = N1-methylpseudouracil
  modified_base 2413: mod_base = OTHER; note = N1-methylpseudouracil
  modified_base 2416: mod_base = OTHER; note = N1-methylpseudouracil
  modified_base 2422: mod_base = OTHER; note = N1-methylpseudouracil
  modified_base 2425: mod_base = OTHER; note = N1-methylpseudouracil
  modified_base 2437: mod_base = OTHER; note = N1-methylpseudouracil
  modified_base 2453: mod_base = OTHER; note = N1-methylpseudouracil
  modified_base 2455: mod_base = OTHER; note = N1-methylpseudouracil
  modified_base 2468: mod_base = OTHER; note = N1-methylpseudouracil
  modified_base 2488: mod_base = OTHER; note = N1-methylpseudouracil
  modified_base 2494: mod_base = OTHER; note = N1-methylpseudouracil
  modified_base 2498: mod_base = OTHER; note = N1-methylpseudouracil
  modified_base 2512: mod_base = OTHER; note = N1-methylpseudouracil
  modified_base 2521: mod_base = OTHER; note = N1-methylpseudouracil
  modified_base 2527: mod_base = OTHER; note = N1-methylpseudouracil
  modified_base 2529: mod_base = OTHER; note = N1-methylpseudouracil
  modified_base 2542: mod_base = OTHER; note = N1-methylpseudouracil
  modified_base 2560: mod_base = OTHER; note = N1-methylpseudouracil
  modified_base 2566: mod_base = OTHER; note = N1-methylpseudouracil
  modified_base 2578: mod_base = OTHER; note = N1-methylpseudouracil
  modified_base 2593: mod_base = OTHER; note = N1-methylpseudouracil
  modified_base 2601: mod_base = OTHER; note = N1-methylpseudouracil
  modified_base 2604: mod_base = OTHER; note = N1-methylpseudouracil
  modified_base 2605: mod_base = OTHER; note = N1-methylpseudouracil
  modified_base 2607: mod_base = OTHER; note = N1-methylpseudouracil
  modified_base 2608: mod_base = OTHER; note = N1-methylpseudouracil
  modified_base 2617: mod_base = OTHER; note = N1-methylpseudouracil
  modified_base 2622: mod_base = OTHER; note = N1-methylpseudouracil
  modified_base 2626: mod_base = OTHER; note = N1-methylpseudouracil
  modified_base 2635: mod_base = OTHER; note = N1-methylpseudouracil
  modified_base 2643: mod_base = OTHER; note = N1-methylpseudouracil
  modified_base 2652: mod_base = OTHER; note = N1-methylpseudouracil
  modified_base 2656: mod_base = OTHER; note = N1-methylpseudouracil
  modified_base 2661: mod_base = OTHER; note = N1-methylpseudouracil
  modified_base 2665: mod_base = OTHER; note = N1-methylpseudouracil
  modified_base 2671: mod_base = OTHER; note = N1-methylpseudouracil
  modified_base 2683: mod_base = OTHER; note = N1-methylpseudouracil
  modified_base 2686: mod_base = OTHER; note = N1-methylpseudouracil
  modified_base 2688: mod_base = OTHER; note = N1-methylpseudouracil
  modified_base 2689: mod_base = OTHER; note = N1-methylpseudouracil
  modified_base 2692: mod_base = OTHER; note = N1-methylpseudouracil
  modified_base 2695: mod_base = OTHER; note = N1-methylpseudouracil
  modified_base 2698: mod_base = OTHER; note = N1-methylpseudouracil
  modified_base 2700: mod_base = OTHER; note = N1-methylpseudouracil
  modified_base 2703: mod_base = OTHER; note = N1-methylpseudouracil
  modified_base 2707: mod_base = OTHER; note = N1-methylpseudouracil
  modified_base 2710: mod_base = OTHER; note = N1-methylpseudouracil
  modified_base 2713: mod_base = OTHER; note = N1-methylpseudouracil
  modified_base 2715: mod_base = OTHER; note = N1-methylpseudouracil
  modified_base 2716: mod_base = OTHER; note = N1-methylpseudouracil
  modified_base 2718: mod_base = OTHER; note = N1-methylpseudouracil
  modified_base 2719: mod_base = OTHER; note = N1-methylpseudouracil
  modified_base 2728: mod_base = OTHER; note = N1-methylpseudouracil
  modified_base 2736: mod_base = OTHER; note = N1-methylpseudouracil
  modified_base 2740: mod_base = OTHER; note = N1-methylpseudouracil
  modified_base 2743: mod_base = OTHER; note = N1-methylpseudouracil
  modified_base 2746: mod_base = OTHER; note = N1-methylpseudouracil
  modified_base 2749: mod_base = OTHER; note = N1-methylpseudouracil
  modified_base 2751: mod_base = OTHER; note = N1-methylpseudouracil
  modified_base 2755: mod_base = OTHER; note = N1-methylpseudouracil
  modified_base 2758: mod_base = OTHER; note = N1-methylpseudouracil
  modified_base 2765: mod_base = OTHER; note = N1-methylpseudouracil
  modified_base 2773: mod_base = OTHER; note = N1-methylpseudouracil
  modified_base 2790: mod_base = OTHER; note = N1-methylpseudouracil
  modified_base 2814: mod_base = OTHER; note = N1-methylpseudouracil
  modified_base 2821: mod_base = OTHER; note = N1-methylpseudouracil
  modified_base 2824: mod_base = OTHER; note = N1-methylpseudouracil
  modified_base 2827: mod_base = OTHER; note = N1-methylpseudouracil
  modified_base 2832: mod_base = OTHER; note = N1-methylpseudouracil
  modified_base 2844: mod_base = OTHER; note = N1-methylpseudouracil
  modified_base 2847: mod_base = OTHER; note = N1-methylpseudouracil
  modified_base 2851: mod_base = OTHER; note = N1-methylpseudouracil
  modified_base 2853: mod_base = OTHER; note = N1-methylpseudouracil
  modified_base 2854: mod_base = OTHER; note = N1-methylpseudouracil
  modified_base 2856: mod_base = OTHER; note = N1-methylpseudouracil
  modified_base 2860: mod_base = OTHER; note = N1-methylpseudouracil
  modified_base 2862: mod_base = OTHER; note = N1-methylpseudouracil
  modified_base 2866: mod_base = OTHER; note = N1-methylpseudouracil
  modified_base 2872: mod_base = OTHER; note = N1-methylpseudouracil
  modified_base 2884: mod_base = OTHER; note = N1-methylpseudouracil
  modified_base 2887: mod_base = OTHER; note = N1-methylpseudouracil
  modified_base 2893: mod_base = OTHER; note = N1-methylpseudouracil
  modified_base 2898: mod_base = OTHER; note = N1-methylpseudouracil
  modified_base 2899: mod_base = OTHER; note = N1-methylpseudouracil
  modified_base 2901: mod_base = OTHER; note = N1-methylpseudouracil
  modified_base 2902: mod_base = OTHER; note = N1-methylpseudouracil
  modified_base 2911: mod_base = OTHER; note = N1-methylpseudouracil
  modified_base 2915: mod_base = OTHER; note = N1-methylpseudouracil
  modified_base 2917: mod_base = OTHER; note = N1-methylpseudouracil
  modified_base 2920: mod_base = OTHER; note = N1-methylpseudouracil
  modified_base 2929: mod_base = OTHER; note = N1-methylpseudouracil
  modified_base 2932: mod_base = OTHER; note = N1-methylpseudouracil
  modified_base 2938: mod_base = OTHER; note = N1-methylpseudouracil
  modified_base 2947: mod_base = OTHER; note = N1-methylpseudouracil
  modified_base 2950: mod_base = OTHER; note = N1-methylpseudouracil
  modified_base 2962: mod_base = OTHER; note = N1-methylpseudouracil
  modified_base 2965: mod_base = OTHER; note = N1-methylpseudouracil
  modified_base 2974: mod_base = OTHER; note = N1-methylpseudouracil
  modified_base 2977: mod_base = OTHER; note = N1-methylpseudouracil
  modified_base 2984: mod_base = OTHER; note = N1-methylpseudouracil
  modified_base 2989: mod_base = OTHER; note = N1-methylpseudouracil
  modified_base 2991: mod_base = OTHER; note = N1-methylpseudouracil
  modified_base 2998: mod_base = OTHER; note = N1-methylpseudouracil
  modified_base 3007: mod_base = OTHER; note = N1-methylpseudouracil
  modified_base 3022: mod_base = OTHER; note = N1-methylpseudouracil
  modified_base 3025: mod_base = OTHER; note = N1-methylpseudouracil
  modified_base 3033: mod_base = OTHER; note = N1-methylpseudouracil
  modified_base 3034: mod_base = OTHER; note = N1-methylpseudouracil
  modified_base 3046: mod_base = OTHER; note = N1-methylpseudouracil
  modified_base 3052: mod_base = OTHER; note = N1-methylpseudouracil
  modified_base 3053: mod_base = OTHER; note = N1-methylpseudouracil
  modified_base 3055: mod_base = OTHER; note = N1-methylpseudouracil
  modified_base 3062: mod_base = OTHER; note = N1-methylpseudouracil
  modified_base 3064: mod_base = OTHER; note = N1-methylpseudouracil
  modified_base 3067: mod_base = OTHER; note = N1-methylpseudouracil
  modified_base 3073: mod_base = OTHER; note = N1-methylpseudouracil
  modified_base 3079: mod_base = OTHER; note = N1-methylpseudouracil
  modified_base 3081: mod_base = OTHER; note = N1-methylpseudouracil
  modified_base 3082: mod_base = OTHER; note = N1-methylpseudouracil
  modified_base 3087: mod_base = OTHER; note = N1-methylpseudouracil
  modified_base 3088: mod_base = OTHER; note = N1-methylpseudouracil
  modified_base 3091: mod_base = OTHER; note = N1-methylpseudouracil
  modified_base 3097: mod_base = OTHER; note = N1-methylpseudouracil
  modified_base 3100: mod_base = OTHER; note = N1-methylpseudouracil
  modified_base 3103: mod_base = OTHER; note = N1-methylpseudouracil
  modified_base 3106: mod_base = OTHER; note = N1-methylpseudouracil
  modified_base 3109: mod_base = OTHER; note = N1-methylpseudouracil
  modified_base 3112: mod_base = OTHER; note = N1-methylpseudouracil
  modified_base 3121: mod_base = OTHER; note = N1-methylpseudouracil
  modified_base 3127: mod_base = OTHER; note = N1-methylpseudouracil
  modified_base 3130: mod_base = OTHER; note = N1-methylpseudouracil
  modified_base 3136: mod_base = OTHER; note = N1-methylpseudouracil
  modified_base 3139: mod_base = OTHER; note = N1-methylpseudouracil
  modified_base 3147: mod_base = OTHER; note = N1-methylpseudouracil
  modified_base 3151: mod_base = OTHER; note = N1-methylpseudouracil
  modified_base 3153: mod_base = OTHER; note = N1-methylpseudouracil
  modified_base 3154: mod_base = OTHER; note = N1-methylpseudouracil
  modified_base 3157: mod_base = OTHER; note = N1-methylpseudouracil
  modified_base 3166: mod_base = OTHER; note = N1-methylpseudouracil
  modified_base 3172: mod_base = OTHER; note = N1-methylpseudouracil
  modified_base 3175: mod_base = OTHER; note = N1-methylpseudouracil
  modified_base 3178: mod_base = OTHER; note = N1-methylpseudouracil
  modified_base 3183: mod_base = OTHER; note = N1-methylpseudouracil
  modified_base 3184: mod_base = OTHER; note = N1-methylpseudouracil
  modified_base 3187: mod_base = OTHER; note = N1-methylpseudouracil
  modified_base 3190: mod_base = OTHER; note = N1-methylpseudouracil
  modified_base 3193: mod_base = OTHER; note = N1-methylpseudouracil
  modified_base 3201: mod_base = OTHER; note = N1-methylpseudouracil
  modified_base 3204: mod_base = OTHER; note = N1-methylpseudouracil
  modified_base 3205: mod_base = OTHER; note = N1-methylpseudouracil
  modified_base 3208: mod_base = OTHER; note = N1-methylpseudouracil
  modified_base 3216: mod_base = OTHER; note = N1-methylpseudouracil
  modified_base 3226: mod_base = OTHER; note = N1-methylpseudouracil
  modified_base 3235: mod_base = OTHER; note = N1-methylpseudouracil
  modified_base 3259: mod_base = OTHER; note = N1-methylpseudouracil
  modified_base 3261: mod_base = OTHER; note = N1-methylpseudouracil
  modified_base 3262: mod_base = OTHER; note = N1-methylpseudouracil
  modified_base 3271: mod_base = OTHER; note = N1-methylpseudouracil
  modified_base 3274: mod_base = OTHER; note = N1-methylpseudouracil
  modified_base 3278: mod_base = OTHER; note = N1-methylpseudouracil
  modified_base 3283: mod_base = OTHER; note = N1-methylpseudouracil
  modified_base 3292: mod_base = OTHER; note = N1-methylpseudouracil
  modified_base 3294: mod_base = OTHER; note = N1-methylpseudouracil
  modified_base 3301: mod_base = OTHER; note = N1-methylpseudouracil
  modified_base 3309: mod_base = OTHER; note = N1-methylpseudouracil
  modified_base 3310: mod_base = OTHER; note = N1-methylpseudouracil
  modified_base 3324: mod_base = OTHER; note = N1-methylpseudouracil
  modified_base 3327: mod_base = OTHER; note = N1-methylpseudouracil
  modified_base 3328: mod_base = OTHER; note = N1-methylpseudouracil
  modified_base 3337: mod_base = OTHER; note = N1-methylpseudouracil
  modified_base 3339: mod_base = OTHER; note = N1-methylpseudouracil
  modified_base 3340: mod_base = OTHER; note = N1-methylpseudouracil
  modified_base 3350: mod_base = OTHER; note = N1-methylpseudouracil
  modified_base 3352: mod_base = OTHER; note = N1-methylpseudouracil
  modified_base 3358: mod_base = OTHER; note = N1-methylpseudouracil
  modified_base 3372: mod_base = OTHER; note = N1-methylpseudouracil
  modified_base 3375: mod_base = OTHER; note = N1-methylpseudouracil
  modified_base 3376: mod_base = OTHER; note = N1-methylpseudouracil
  modified_base 3379: mod_base = OTHER; note = N1-methylpseudouracil
  modified_base 3381: mod_base = OTHER; note = N1-methylpseudouracil
  modified_base 3385: mod_base = OTHER; note = N1-methylpseudouracil
  modified_base 3394: mod_base = OTHER; note = N1-methylpseudouracil
  modified_base 3399: mod_base = OTHER; note = N1-methylpseudouracil
  modified_base 3402: mod_base = OTHER; note = N1-methylpseudouracil
  modified_base 3403: mod_base = OTHER; note = N1-methylpseudouracil
  modified_base 3409: mod_base = OTHER; note = N1-methylpseudouracil
  modified_base 3415: mod_base = OTHER; note = N1-methylpseudouracil
  modified_base 3421: mod_base = OTHER; note = N1-methylpseudouracil
  modified_base 3424: mod_base = OTHER; note = N1-methylpseudouracil
  modified_base 3426: mod_base = OTHER; note = N1-methylpseudouracil
  modified_base 3427: mod_base = OTHER; note = N1-methylpseudouracil
  modified_base 3430: mod_base = OTHER; note = N1-methylpseudouracil
  modified_base 3433: mod_base = OTHER; note = N1-methylpseudouracil
  modified_base 3435: mod_base = OTHER; note = N1-methylpseudouracil
  modified_base 3436: mod_base = OTHER; note = N1-methylpseudouracil
  modified_base 3438: mod_base = OTHER; note = N1-methylpseudouracil
  modified_base 3439: mod_base = OTHER; note = N1-methylpseudouracil
  modified_base 3442: mod_base = OTHER; note = N1-methylpseudouracil
  modified_base 3448: mod_base = OTHER; note = N1-methylpseudouracil
  modified_base 3453: mod_base = OTHER; note = N1-methylpseudouracil
  modified_base 3454: mod_base = OTHER; note = N1-methylpseudouracil
  modified_base 3457: mod_base = OTHER; note = N1-methylpseudouracil
  modified_base 3459: mod_base = OTHER; note = N1-methylpseudouracil
  modified_base 3463: mod_base = OTHER; note = N1-methylpseudouracil
  modified_base 3466: mod_base = OTHER; note = N1-methylpseudouracil
  modified_base 3493: mod_base = OTHER; note = N1-methylpseudouracil
  modified_base 3499: mod_base = OTHER; note = N1-methylpseudouracil
  modified_base 3502: mod_base = OTHER; note = N1-methylpseudouracil
  modified_base 3505: mod_base = OTHER; note = N1-methylpseudouracil
  modified_base 3511: mod_base = OTHER; note = N1-methylpseudouracil
  modified_base 3517: mod_base = OTHER; note = N1-methylpseudouracil
  modified_base 3521: mod_base = OTHER; note = N1-methylpseudouracil
  modified_base 3523: mod_base = OTHER; note = N1-methylpseudouracil
  modified_base 3526: mod_base = OTHER; note = N1-methylpseudouracil
  modified_base 3535: mod_base = OTHER; note = N1-methylpseudouracil
  modified_base 3540: mod_base = OTHER; note = N1-methylpseudouracil
  modified_base 3547: mod_base = OTHER; note = N1-methylpseudouracil
  modified_base 3559: mod_base = OTHER; note = N1-methylpseudouracil
  modified_base 3565: mod_base = OTHER; note = N1-methylpseudouracil
  modified_base 3574: mod_base = OTHER; note = N1-methylpseudouracil
  modified_base 3577: mod_base = OTHER; note = N1-methylpseudouracil
  modified_base 3582: mod_base = OTHER; note = N1-methylpseudouracil
  modified_base 3586: mod_base = OTHER; note = N1-methylpseudouracil
  modified_base 3588: mod_base = OTHER; note = N1-methylpseudouracil
  modified_base 3595: mod_base = OTHER; note = N1-methylpseudouracil
  modified_base 3597: mod_base = OTHER; note = N1-methylpseudouracil
  modified_base 3598: mod_base = OTHER; note = N1-methylpseudouracil
  modified_base 3603: mod_base = OTHER; note = N1-methylpseudouracil
  modified_base 3604: mod_base = OTHER; note = N1-methylpseudouracil
  modified_base 3607: mod_base = OTHER; note = N1-methylpseudouracil
  modified_base 3613: mod_base = OTHER; note = N1-methylpseudouracil
  modified_base 3651: mod_base = OTHER; note = N1-methylpseudouracil
  modified_base 3667: mod_base = OTHER; note = N1-methylpseudouracil
  modified_base 3676: mod_base = OTHER; note = N1-methylpseudouracil
  modified_base 3679: mod_base = OTHER; note = N1-methylpseudouracil
  modified_base 3682: mod_base = OTHER; note = N1-methylpseudouracil
  modified_base 3683: mod_base = OTHER; note = N1-methylpseudouracil
  modified_base 3685: mod_base = OTHER; note = N1-methylpseudouracil
  modified_base 3700: mod_base = OTHER; note = N1-methylpseudouracil
  modified_base 3715: mod_base = OTHER; note = N1-methylpseudouracil
  modified_base 3717: mod_base = OTHER; note = N1-methylpseudouracil
  modified_base 3722: mod_base = OTHER; note = N1-methylpseudouracil
  modified_base 3723: mod_base = OTHER; note = N1-methylpseudouracil
  modified_base 3736: mod_base = OTHER; note = N1-methylpseudouracil
  modified_base 3742: mod_base = OTHER; note = N1-methylpseudouracil
  modified_base 3751: mod_base = OTHER; note = N1-methylpseudouracil
  modified_base 3762: mod_base = OTHER; note = N1-methylpseudouracil
  modified_base 3784: mod_base = OTHER; note = N1-methylpseudouracil
  modified_base 3787: mod_base = OTHER; note = N1-methylpseudouracil
  modified_base 3796: mod_base = OTHER; note = N1-methylpseudouracil
  modified_base 3801: mod_base = OTHER; note = N1-methylpseudouracil
  modified_base 3802: mod_base = OTHER; note = N1-methylpseudouracil
  modified_base 3804: mod_base = OTHER; note = N1-methylpseudouracil
  modified_base 3808: mod_base = OTHER; note = N1-methylpseudouracil
  modified_base 3809: mod_base = OTHER; note = N1-methylpseudouracil
  modified_base 3815: mod_base = OTHER; note = N1-methylpseudouracil
  modified_base 3826: mod_base = OTHER; note = N1-methylpseudouracil
  modified_base 3832: mod_base = OTHER; note = N1-methylpseudouracil
  modified_base 3834: mod_base = OTHER; note = N1-methylpseudouracil
  modified_base 3835: mod_base = OTHER; note = N1-methylpseudouracil
  modified_base 3851: mod_base = OTHER; note = N1-methylpseudouracil
  modified_base 3865: mod_base = OTHER; note = N1-methylpseudouracil
  modified_base 3868: mod_base = OTHER; note = N1-methylpseudouracil
  modified_base 3870: mod_base = OTHER; note = N1-methylpseudouracil
  modified_base 3876: mod_base = OTHER; note = N1-methylpseudouracil
  modified_base 3877: mod_base = OTHER; note = N1-methylpseudouracil
  modified_base 3880: mod_base = OTHER; note = N1-methylpseudouracil
  modified_base 3886: mod_base = OTHER; note = N1-methylpseudouracil
  modified_base 3889: mod_base = OTHER; note = N1-methylpseudouracil
  modified_base 3907: mod_base = OTHER; note = N1-methylpseudouracil
  modified_base 3913: mod_base = OTHER; note = N1-methylpseudouracil
  modified_base 3922: mod_base = OTHER; note = N1-methylpseudouracil
  modified_base 3927: mod_base = OTHER; note = N1-methylpseudouracil
  modified_base 3937: mod_base = OTHER; note = N1-methylpseudouracil
  modified_base 3943: mod_base = OTHER; note = N1-methylpseudouracil
  modified_base 3951: mod_base = OTHER; note = N1-methylpseudouracil
  modified_base 3963: mod_base = OTHER; note = N1-methylpseudouracil
  modified_base 3964: mod_base = OTHER; note = N1-methylpseudouracil
  modified_base 3970: mod_base = OTHER; note = N1-methylpseudouracil
  modified_base 3973: mod_base = OTHER; note = N1-methylpseudouracil
  modified_base 3985: mod_base = OTHER; note = N1-methylpseudouracil
  modified_base 3987: mod_base = OTHER; note = N1-methylpseudouracil
  modified_base 3988: mod_base = OTHER; note = N1-methylpseudouracil
  modified_base 3989: mod_base = OTHER; note = N1-methylpseudouracil
  modified_base 3991: mod_base = OTHER; note = N1-methylpseudouracil
  modified_base 3992: mod_base = OTHER; note = N1-methylpseudouracil
  modified_base 3993: mod_base = OTHER; note = N1-methylpseudouracil
  modified_base 3994: mod_base = OTHER; note = N1-methylpseudouracil
  modified_base 3996: mod_base = OTHER; note = N1-methylpseudouracil
  modified_base 3998: mod_base = OTHER; note = N1-methylpseudouracil
  modified_base 4005: mod_base = OTHER; note = N1-methylpseudouracil
  modified_base 4006: mod_base = OTHER; note = N1-methylpseudouracil
  modified_base 4007: mod_base = OTHER; note = N1-methylpseudouracil
  modified_base 4018: mod_base = OTHER; note = N1-methylpseudouracil
  modified_base 4026: mod_base = OTHER; note = N1-methylpseudouracil
  modified_base 4035: mod_base = OTHER; note = N1-methylpseudouracil
  modified_base 4038: mod_base = OTHER; note = N1-methylpseudouracil
  modified_base 4051: mod_base = OTHER; note = N1-methylpseudouracil
  modified_base 4053: mod_base = OTHER; note = N1-methylpseudouracil
  modified_base 4060: mod_base = OTHER; note = N1-methylpseudouracil
  modified_base 4072: mod_base = OTHER; note = N1-methylpseudouracil
  modified_base 4078: mod_base = OTHER; note = N1-methylpseudouracil
  modified_base 4083: mod_base = OTHER; note = N1-methylpseudouracil
  modified_base 4087: mod_base = OTHER; note = N1-methylpseudouracil
  modified_base 4090: mod_base = OTHER; note = N1-methylpseudouracil
  modified_base 4098: mod_base = OTHER; note = N1-methylpseudouracil
  modified_base 4099: mod_base = OTHER; note = N1-methylpseudouracil
  modified_base 4111: mod_base = OTHER; note = N1-methylpseudouracil
  modified_base 4116: mod_base = OTHER; note = N1-methylpseudouracil
  modified_base 4117: mod_base = OTHER; note = N1-methylpseudouracil
  modified_base 4120: mod_base = OTHER; note = N1-methylpseudouracil
  modified_base 4123: mod_base = OTHER; note = N1-methylpseudouracil
  modified_base 4126: mod_base = OTHER; note = N1-methylpseudouracil
  modified_base 4137: mod_base = OTHER; note = N1-methylpseudouracil
  modified_base 4141: mod_base = OTHER; note = N1-methylpseudouracil
  modified_base 4144: mod_base = OTHER; note = N1-methylpseudouracil
  modified_base 4165: mod_base = OTHER; note = N1-methylpseudouracil
  modified_base 4168: mod_base = OTHER; note = N1-methylpseudouracil
  modified_base 4170: mod_base = OTHER; note = N1-methylpseudouracil
  modified_base 4174: mod_base = OTHER; note = N1-methylpseudouracil
  modified_base 4186: mod_base = OTHER; note = N1-methylpseudouracil
  modified_base 4189: mod_base = OTHER; note = N1-methylpseudouracil
  modified_base 4204: mod_base = OTHER; note = N1-methylpseudouracil
  modified_base 4207: mod_base = OTHER; note = N1-methylpseudouracil
  modified_base 4210: mod_base = OTHER; note = N1-methylpseudouracil
  modified_base 4213: mod_base = OTHER; note = N1-methylpseudouracil
  modified_base 4224: mod_base = OTHER; note = N1-methylpseudouracil
  modified_base 4234: mod_base = OTHER; note = N1-methylpseudouracil
  modified_base 4238: mod_base = OTHER; note = N1-methylpseudouracil
  modified_base 4243: mod_base = OTHER; note = N1-methylpseudouracil
  modified_base 4248: mod_base = OTHER; note = N1-methylpseudouracil
  modified_base 4255: mod_base = OTHER; note = N1-methylpseudouracil
  modified_base 4258: mod_base = OTHER; note = N1-methylpseudouracil
  modified_base 4270: mod_base = OTHER; note = N1-methylpseudouracil
  modified_base 4281: mod_base = OTHER; note = N1-methylpseudouracil
  modified_base 4282: mod_base = OTHER; note = N1-methylpseudouracil
  modified_base 4290: mod_base = OTHER; note = N1-methylpseudouracil
  modified_base 4297: mod_base = OTHER; note = N1-methylpseudouracil
  modified_base 4300: mod_base = OTHER; note = N1-methylpseudouracil
  modified_base 4303: mod_base = OTHER; note = N1-methylpseudouracil
  modified_base 4305: mod_base = OTHER; note = N1-methylpseudouracil
  modified_base 4318: mod_base = OTHER; note = N1-methylpseudouracil
  modified_base 4325: mod_base = OTHER; note = N1-methylpseudouracil
  modified_base 4327: mod_base = OTHER; note = N1-methylpseudouracil
  modified_base 4330: mod_base = OTHER; note = N1-methylpseudouracil
  modified_base 4335: mod_base = OTHER; note = N1-methylpseudouracil
  modified_base 4344: mod_base = OTHER; note = N1-methylpseudouracil
  modified_base 4345: mod_base = OTHER; note = N1-methylpseudouracil
  modified_base 4348: mod_base = OTHER; note = N1-methylpseudouracil
  modified_base 4351: mod_base = OTHER; note = N1-methylpseudouracil
  modified_base 4354: mod_base = OTHER; note = N1-methylpseudouracil
  modified_base 4369: mod_base = OTHER; note = N1-methylpseudouracil
  modified_base 4377: mod_base = OTHER; note = N1-methylpseudouracil
  modified_base 4383: mod_base = OTHER; note = N1-methylpseudouracil
  modified_base 4387: mod_base = OTHER; note = N1-methylpseudouracil
  modified_base 4396: mod_base = OTHER; note = N1-methylpseudouracil
  modified_base 4399: mod_base = OTHER; note = N1-methylpseudouracil
  modified_base 4414: mod_base = OTHER; note = N1-methylpseudouracil
  modified_base 4416: mod_base = OTHER; note = N1-methylpseudouracil
  modified_base 4417: mod_base = OTHER; note = N1-methylpseudouracil
  modified_base 4427: mod_base = OTHER; note = N1-methylpseudouracil
  modified_base 4429: mod_base = OTHER; note = N1-methylpseudouracil
  modified_base 4431: mod_base = OTHER; note = N1-methylpseudouracil
  modified_base 4433: mod_base = OTHER; note = N1-methylpseudouracil
  modified_base 4442: mod_base = OTHER; note = N1-methylpseudouracil
  modified_base 4447: mod_base = OTHER; note = N1-methylpseudouracil
  modified_base 4453: mod_base = OTHER; note = N1-methylpseudouracil
  modified_base 4455: mod_base = OTHER; note = N1-methylpseudouracil
  modified_base 4456: mod_base = OTHER; note = N1-methylpseudouracil
  modified_base 4460: mod_base = OTHER; note = N1-methylpseudouracil
  modified_base 4479: mod_base = OTHER; note = N1-methylpseudouracil
  modified_base 4485: mod_base = OTHER; note = N1-methylpseudouracil
  modified_base 4487: mod_base = OTHER; note = N1-methylpseudouracil
  modified_base 4498: mod_base = OTHER; note = N1-methylpseudouracil
  modified_base 4507: mod_base = OTHER; note = N1-methylpseudouracil
  modified_base 4531: mod_base = OTHER; note = N1-methylpseudouracil
  modified_base 4538: mod_base = OTHER; note = N1-methylpseudouracil
  modified_base 4546: mod_base = OTHER; note = N1-methylpseudouracil
  modified_base 4548: mod_base = OTHER; note = N1-methylpseudouracil
  modified_base 4554: mod_base = OTHER; note = N1-methylpseudouracil
  modified_base 4566: mod_base = OTHER; note = N1-methylpseudouracil
  modified_base 4575: mod_base = OTHER; note = N1-methylpseudouracil
  modified_base 4576: mod_base = OTHER; note = N1-methylpseudouracil
  modified_base 4578: mod_base = OTHER; note = N1-methylpseudouracil
  modified_base 4582: mod_base = OTHER; note = N1-methylpseudouracil
  modified_base 4583: mod_base = OTHER; note = N1-methylpseudouracil
  modified_base 4586: mod_base = OTHER; note = N1-methylpseudouracil
  modified_base 4589: mod_base = OTHER; note = N1-methylpseudouracil
  modified_base 4594: mod_base = OTHER; note = N1-methylpseudouracil
  modified_base 4597: mod_base = OTHER; note = N1-methylpseudouracil
  modified_base 4600: mod_base = OTHER; note = N1-methylpseudouracil
  modified_base 4611: mod_base = OTHER; note = N1-methylpseudouracil
  modified_base 4619: mod_base = OTHER; note = N1-methylpseudouracil
  modified_base 4627: mod_base = OTHER; note = N1-methylpseudouracil
  modified_base 4630: mod_base = OTHER; note = N1-methylpseudouracil
  modified_base 4632: mod_base = OTHER; note = N1-methylpseudouracil
  modified_base 4633: mod_base = OTHER; note = N1-methylpseudouracil
  modified_base 4634: mod_base = OTHER; note = N1-methylpseudouracil
  modified_base 4638: mod_base = OTHER; note = N1-methylpseudouracil
  modified_base 4643: mod_base = OTHER; note = N1-methylpseudouracil
  modified_base 4645: mod_base = OTHER; note = N1-methylpseudouracil
  modified_base 4649: mod_base = OTHER; note = N1-methylpseudouracil
ggaggaaatttttttttgatattataagagtttttttttgatattaagaaaatttttttttgatattagaagagtaagaagaaatataagaccccggcgccgccaccatgcaaagaagtccattagagaaagcgtcggttgtgagcaagctgttcttcagctggaccaggcccatcctgcgaaagggctacagacagaggctggagctgtccgacatctaccagattccatccgtggacagcgccgacaatctgagcgagaagctggagagggagtgggaccgcgagctggccagcaagaagaaccctaagctgatcaacgccctgcgccgctgcttcttctggaggttcatgttctacggcatcttcctgtacctgggcgaggtgaccaaggccgtccagcctctgctgctgggccgcatcatcgccagctacgatcccgacaacaaggaggaacgctccatcgccatctacctgggcatcggcctgtgtctgctgttcatcgtgcggaccctgctgctgcaccccgccatcttcggcctgcatcacatcggcatgcagatgaggatcgccatgttctccctgatctacaagaagaccctgaagctgtccagccgcgtgctggataagatcagcatcgggcagctggtgagcctgctgagcaacaacctgaacaagttcgacgaggggttggcgctggcccacttcgtgtggattgccccgctgcaggtggctctgctgatggggctgatctgggagctgctgcaggcctctgccttctgcgggctggggtttctgatcgtgctggccctgttccaagctggcctgggccgcatgatgatgaagtaccgcgatcagagggccggcaagatcagcgagcgcctggtgatcactagcgagatgatagagaacatccagagcgtgaaggcttactgttgggaggaggccatggagaagatgatcgagaacctgaggcagaccgagctgaagctgactagaaaggcagcctacgtgaggtatttcaactccagcgccttcttcttcagcggcttcttcgtggtgttcctgagcgtgctgccctacgccctgatcaagggcatcatcctgaggaagatcttcaccaccattagcttctgcatcgtgctgcgcatggccgtgaccaggcagttcccttgggccgtgcagacttggtacgacagcctgggagccatcaacaagatccaggactttctgcagaagcaggaatataagaccctggagtacaacctgaccaccaccgaggtggtgatggagaacgtgaccgccttctgggaggagggcttcggcgagctgttcgagaaggccaagcagaacaataacaaccgcaagaccagcaacggcgacgactccctcttcttcagcaactttagcctgctgggcacccctgtgctgaaggacatcaacttcaagatcgaaagaggccaactgctggccgtggccggatctaccggcgccggcaagaccagcctgctgatgatgatcatgggcgagctggagcccagcgagggcaagatcaagcacagcggccggatctccttctgctcccagttctcctggatcatgcccggcaccatcaaggagaacatcatcttcggcgtgagctacgacgagtacaggtaccggagcgtgatcaaggcctgccagctggaggaggacatctccaaatttgccgagaaggacaacattgtgctgggcgaaggcgggatcaccctgtccggtggccagcgtgcacgcatctccctggcccgggctgtgtacaaggacgccgacctgtacctgctggacagcccttttggctacctggacgtgctgaccgagaaggagatcttcgagtcctgcgtgtgtaagctgatggccaacaagaccagaatcctggtgaccagcaagatggagcatctgaagaaggccgacaagatcctgatcctgcacgaggggtccagctacttctacggcaccttcagcgagctgcagaacctgcagcccgacttcagctccaagctgatgggctgcgatagcttcgaccagttctccgccgagagaaggaactccattctgaccgagaccctgcaccgattctccctggagggagacgccccagtgagctggaccgagaccaagaagcagagcttcaagcagaccggcgagttcggagagaagcgcaagaactccatcctcaaccccatcaacagcatccggaagttcagcatcgtgcagaagacccctctgcagatgaacgggatcgaggaggacagcgacgagcccctggaacggcgactgtccctcgtgcccgacagcgagcagggcgaggccatcctgccccggatctccgtgatctccactgggcccaccctgcaagcccgacggcggcaaagcgtgctgaacctgatgacccacagcgtgaaccagggccagaatatccaccgcaagactacagccagcacccgcaaggtgagcctggctccccaggccaacctgaccgagctggacatctacagcaggaggctgagccaggagacaggcctggagatcagcgaggagatcaacgaggaggacctgaaggagtgcttcttcgacgacatggagtccatccccgccgtgaccacctggaacacctacctgagatacatcaccgtgcacaagagcctgatcttcgtgctgatctggtgcctggtgatcttcttggccgaggtagccgcctcactggtggtgctgtggctgctgggcaataccccactgcaggacaaggggaactccacccacagccggaacaacagctacgccgtgatcatcacctccaccagcagctactacgtgttctacatctacgtgggcgtggccgacacactgctggccatgggcttcttcagaggcctccctctggtgcacacactgatcaccgtgagcaagatcctgcaccacaagatgctgcacagcgtgctgcaggctcccatgtcaaccctgaacaccctgaaggccggcggcatcctgaacaggttcagcaaggacatcgccattctggacgatctgctgcccctgaccatcttcgacttcatccagctgctgctgatcgtgatcggggccatcgccgtggtggccgtgctgcagccctacatcttcgtggccacagtgcccgtgatcgtggccttcatcatgctgcgcgcctacttcctgcagacctcccagcagctgaagcagctggagagcgaaggccgcagccccatcttcacccacctggtgactagcctgaaggggctgtggaccctgcgcgccttcggcaggcagccctacttcgagaccctgttccacaaggctctgaacctgcacaccgccaactggttcctgtacctcagcaccctgcgctggttccagatgcggatcgagatgatcttcgtgatcttcttcatcgccgtgaccttcatctccatcctgaccaccggggaaggcgagggacgggtgggaatcatcctgaccctggccatgaatatcatgagcaccctgcagtgggccgtgaacagcagcatcgacgtggacagcctgatgcggtccgtgtcccgggtgttcaagttcatcgacatgcccaccgagggcaagcccaccaagagcaccaagccctacaagaacggccagctgagcaaggtgatgattatcgagaacagccacgtgaagaaggacgacatctggccttccggcggccagatgaccgtgaaggacctgaccgccaagtacaccgagggcggcaacgccatcctggagaacatcagcttctccattagccctggacagcgggtgggcctgttgggacggaccggcagtgggaagagcaccctgctgtccgccttcctgcggctgctgaacacggagggcgagatccagatcgacggggtgagctgggacagcatcaccctgcagcagtggcgaaaggccttcggcgtgatcccacagaaggtgtttattttctctggcacctttaggaagaacctggacccctacgagcagtggtccgaccaggagatctggaaggtggccgacgaggtgggcctgcggtcagtgatcgagcagttccccggcaagctggacttcgtgctggtggacggcggctgcgtgctgagccacggccacaagcagctgatgtgcctggcacgcagcgtgctgagcaaggccaagatcctgctgctggacgagccctccgcgcacctggatcccgtgacctaccagatcatcaggcggaccctgaagcaggccttcgccgactgcaccgtgatcctgtgcgagagcagaatcgaggctatgctggagtgccagcagttcctggtgatcgaggagaacaaggtgcggcagtacgactccatccagaagctgctgaacgagcgcagcctgttcagacaggctatctctcccagcgatcgcgtgaagctgttccctcacaggaacagcagcaagtgcaagtctaagccacagatcgccgccctgaaggaggagaccgaggaggaggtgcaggatacccgcctgtaaagctccccgggggcctccaccgcgttatccgttcctcgtaggctggtcctggggaacgggtcggcgggtacccccgtggtctttgaataaagtctgagtgggcggcaaaaaaaaaaaaaaaaaaaaaaaaaaaaaaaaaaaaaaaaaaaaaaaaaaaaaaaaaaaaaaaaaaaaaaaaaaaaaaaaaaaaaaaaaaaaaaaaaaaa

SEQ ID NO: 20 - RNA, 4756 nt, synthetic construct
  source 1..4756: mol_type = other RNA
  modified_base 1: mod_base = OTHER; note = 7-Methylguanosine with triphosphate linkage
  modified_base 2: mod_base = OTHER; note = 2'-O-methyl modified nucleotide
  modified_base 9: mod_base = OTHER; note = N1-methylpseudouracil
  modified_base 10: mod_base = OTHER; note = N1-methylpseudouracil
  modified_base 11: mod_base = OTHER; note = N1-methylpseudouracil
  modified_base 12: mod_base = OTHER; note = N1-methylpseudouracil
  modified_base 13: mod_base = OTHER; note = N1-methylpseudouracil
  modified_base 14: mod_base = OTHER; note = N1-methylpseudouracil
  modified_base 15: mod_base = OTHER; note = N1-methylpseudouracil
  modified_base 16: mod_base = OTHER; note = N1-methylpseudouracil
  modified_base 17: mod_base = OTHER; note = N1-methylpseudouracil
  modified_base 20: mod_base = OTHER; note = N1-methylpseudouracil
  modified_base 22: mod_base = OTHER; note = N1-methylpseudouracil
  modified_base 23: mod_base = OTHER; note = N1-methylpseudouracil
  modified_base 25: mod_base = OTHER; note = N1-methylpseudouracil
  modified_base 31: mod_base = OTHER; note = N1-methylpseudouracil
  modified_base 32: mod_base = OTHER; note = N1-methylpseudouracil
  modified_base 33: mod_base = OTHER; note = N1-methylpseudouracil
  modified_base 34: mod_base = OTHER; note = N1-methylpseudouracil
  modified_base 35: mod_base = OTHER; note = N1-methylpseudouracil
  modified_base 36: mod_base = OTHER; note = N1-methylpseudouracil
  modified_base 37: mod_base = OTHER; note = N1-methylpseudouracil
  modified_base 38: mod_base = OTHER; note = N1-methylpseudouracil
  modified_base 39: mod_base = OTHER; note = N1-methylpseudouracil
  modified_base 42: mod_base = OTHER; note = N1-methylpseudouracil
  modified_base 44: mod_base = OTHER; note = N1-methylpseudouracil
  modified_base 45: mod_base = OTHER; note = N1-methylpseudouracil
  modified_base 53: mod_base = OTHER; note = N1-methylpseudouracil
  modified_base 54: mod_base = OTHER; note = N1-methylpseudouracil
  modified_base 55: mod_base = OTHER; note = N1-methylpseudouracil
  modified_base 56: mod_base = OTHER; note = N1-methylpseudouracil
  modified_base 57: mod_base = OTHER; note = N1-methylpseudouracil
  modified_base 58: mod_base = OTHER; note = N1-methylpseudouracil
  modified_base 59: mod_base = OTHER; note = N1-methylpseudouracil
  modified_base 60: mod_base = OTHER; note = N1-methylpseudouracil
  modified_base 61: mod_base = OTHER; note = N1-methylpseudouracil
  modified_base 64: mod_base = OTHER; note = N1-methylpseudouracil
  modified_base 66: mod_base = OTHER; note = N1-methylpseudouracil
  modified_base 67: mod_base = OTHER; note = N1-methylpseudouracil
  modified_base 75: mod_base = OTHER; note = N1-methylpseudouracil
  modified_base 85: mod_base = OTHER; note = N1-methylpseudouracil
  modified_base 87: mod_base = OTHER; note = N1-methylpseudouracil
  modified_base 109: mod_base = OTHER; note = N1-methylpseudouracil
  modified_base 122: mod_base = OTHER; note = N1-methylpseudouracil
  modified_base 124: mod_base = OTHER; note = N1-methylpseudouracil
  modified_base 139: mod_base = OTHER; note = N1-methylpseudouracil
  modified_base 142: mod_base = OTHER; note = N1-methylpseudouracil
  modified_base 151: mod_base = OTHER; note = N1-methylpseudouracil
  modified_base 153: mod_base = OTHER; note = N1-methylpseudouracil
  modified_base 154: mod_base = OTHER; note = N1-methylpseudouracil
  modified_base 156: mod_base = OTHER; note = N1-methylpseudouracil
  modified_base 157: mod_base = OTHER; note = N1-methylpseudouracil
  modified_base 162: mod_base = OTHER; note = N1-methylpseudouracil
  modified_base 175: mod_base = OTHER; note = N1-methylpseudouracil
  modified_base 178: mod_base = OTHER; note = N1-methylpseudouracil
  modified_base 189: mod_base = OTHER; note = N1-methylpseudouracil
  modified_base 202: mod_base = OTHER; note = N1-methylpseudouracil
  modified_base 208: mod_base = OTHER; note = N1-methylpseudouracil
  modified_base 210: mod_base = OTHER; note = N1-methylpseudouracil
  modified_base 217: mod_base = OTHER; note = N1-methylpseudouracil
  modified_base 219: mod_base = OTHER; note = N1-methylpseudouracil
  modified_base 226: mod_base = OTHER; note = N1-methylpseudouracil
  modified_base 227: mod_base = OTHER; note = N1-methylpseudouracil
  modified_base 231: mod_base = OTHER; note = N1-methylpseudouracil
  modified_base 235: mod_base = OTHER; note = N1-methylpseudouracil
  modified_base 251: mod_base = OTHER; note = N1-methylpseudouracil
  modified_base 253: mod_base = OTHER; note = N1-methylpseudouracil
  modified_base 265: mod_base = OTHER; note = N1-methylpseudouracil
  modified_base 276: mod_base = OTHER; note = N1-methylpseudouracil
  modified_base 289: mod_base = OTHER; note = N1-methylpseudouracil
  modified_base 308: mod_base = OTHER; note = N1-methylpseudouracil
  modified_base 313: mod_base = OTHER; note = N1-methylpseudouracil
  modified_base 316: mod_base = OTHER; note = N1-methylpseudouracil
  modified_base 325: mod_base = OTHER; note = N1-methylpseudouracil
  modified_base 333: mod_base = OTHER; note = N1-methylpseudouracil
  modified_base 336: mod_base = OTHER; note = N1-methylpseudouracil
  modified_base 337: mod_base = OTHER; note = N1-methylpseudouracil
  modified_base 339: mod_base = OTHER; note = N1-methylpseudouracil
  modified_base 340: mod_base = OTHER; note = N1-methylpseudouracil
  modified_base 342: mod_base = OTHER; note = N1-methylpseudouracil
  modified_base 348: mod_base = OTHER; note = N1-methylpseudouracil
  modified_base 349: mod_base = OTHER; note = N1-methylpseudouracil
  modified_base 352: mod_base = OTHER; note = N1-methylpseudouracil
  modified_base 354: mod_base = OTHER; note = N1-methylpseudouracil
  modified_base 355: mod_base = OTHER; note = N1-methylpseudouracil
  modified_base 357: mod_base = OTHER; note = N1-methylpseudouracil
  modified_base 364: mod_base = OTHER; note = N1-methylpseudouracil
  modified_base 366: mod_base = OTHER; note = N1-methylpseudouracil
  modified_base 367: mod_base = OTHER; note = N1-methylpseudouracil
  modified_base 370: mod_base = OTHER; note = N1-methylpseudouracil
  modified_base 372: mod_base = OTHER; note = N1-methylpseudouracil
  modified_base 376: mod_base = OTHER; note = N1-methylpseudouracil
  modified_base 385: mod_base = OTHER; note = N1-methylpseudouracil
  modified_base 397: mod_base = OTHER; note = N1-methylpseudouracil
  modified_base 404: mod_base = OTHER; note = N1-methylpseudouracil
  modified_base 406: mod_base = OTHER; note = N1-methylpseudouracil
  modified_base 409: mod_base = OTHER; note = N1-methylpseudouracil
  modified_base 412: mod_base = OTHER; note = N1-methylpseudouracil
  modified_base 421: mod_base = OTHER; note = N1-methylpseudouracil
  modified_base 424: mod_base = OTHER; note = N1-methylpseudouracil
  modified_base 432: mod_base = OTHER; note = N1-methylpseudouracil
  modified_base 437: mod_base = OTHER; note = N1-methylpseudouracil
  modified_base 459: mod_base = OTHER; note = N1-methylpseudouracil
  modified_base 463: mod_base = OTHER; note = N1-methylpseudouracil
  modified_base 469: mod_base = OTHER; note = N1-methylpseudouracil
  modified_base 471: mod_base = OTHER; note = N1-methylpseudouracil
  modified_base 475: mod_base = OTHER; note = N1-methylpseudouracil
  modified_base 481: mod_base = OTHER; note = N1-methylpseudouracil
  modified_base 487: mod_base = OTHER; note = N1-methylpseudouracil
  modified_base 489: mod_base = OTHER; note = N1-methylpseudouracil
  modified_base 491: mod_base = OTHER; note = N1-methylpseudouracil
  modified_base 493: mod_base = OTHER; note = N1-methylpseudouracil
  modified_base 496: mod_base = OTHER; note = N1-methylpseudouracil
  modified_base 498: mod_base = OTHER; note = N1-methylpseudouracil
  modified_base 499: mod_base = OTHER; note = N1-methylpseudouracil
  modified_base 502: mod_base = OTHER; note = N1-methylpseudouracil
  modified_base 505: mod_base = OTHER; note = N1-methylpseudouracil
  modified_base 514: mod_base = OTHER; note = N1-methylpseudouracil
  modified_base 517: mod_base = OTHER; note = N1-methylpseudouracil
  modified_base 520: mod_base = OTHER; note = N1-methylpseudouracil
  modified_base 532: mod_base = OTHER; note = N1-methylpseudouracil
  modified_base 534: mod_base = OTHER; note = N1-methylpseudouracil
  modified_base 535: mod_base = OTHER; note = N1-methylpseudouracil
  modified_base 541: mod_base = OTHER; note = N1-methylpseudouracil
  modified_base 545: mod_base = OTHER; note = N1-methylpseudouracil
  modified_base 550: mod_base = OTHER; note = N1-methylpseudouracil
  modified_base 556: mod_base = OTHER; note = N1-methylpseudouracil
  modified_base 562: mod_base = OTHER; note = N1-methylpseudouracil
  modified_base 568: mod_base = OTHER; note = N1-methylpseudouracil
  modified_base 574: mod_base = OTHER; note = N1-methylpseudouracil
  modified_base 576: mod_base = OTHER; note = N1-methylpseudouracil
  modified_base 577: mod_base = OTHER; note = N1-methylpseudouracil
  modified_base 579: mod_base = OTHER; note = N1-methylpseudouracil
  modified_base 583: mod_base = OTHER; note = N1-methylpseudouracil
  modified_base 586: mod_base = OTHER; note = N1-methylpseudouracil
  modified_base 588: mod_base = OTHER; note = N1-methylpseudouracil
  modified_base 601: mod_base = OTHER; note = N1-methylpseudouracil
  modified_base 607: mod_base = OTHER; note = N1-methylpseudouracil
  modified_base 609: mod_base = OTHER; note = N1-methylpseudouracil
  modified_base 619: mod_base = OTHER; note = N1-methylpseudouracil
  modified_base 622: mod_base = OTHER; note = N1-methylpseudouracil
  modified_base 626: mod_base = OTHER; note = N1-methylpseudouracil
  modified_base 631: mod_base = OTHER; note = N1-methylpseudouracil
  modified_base 637: mod_base = OTHER; note = N1-methylpseudouracil
  modified_base 646: mod_base = OTHER; note = N1-methylpseudouracil
  modified_base 649: mod_base = OTHER; note = N1-methylpseudouracil
  modified_base 655: mod_base = OTHER; note = N1-methylpseudouracil
  modified_base 658: mod_base = OTHER; note = N1-methylpseudouracil
  modified_base 670: mod_base = OTHER; note = N1-methylpseudouracil
  modified_base 678: mod_base = OTHER; note = N1-methylpseudouracil
  modified_base 679: mod_base = OTHER; note = N1-methylpseudouracil
  modified_base 690: mod_base = OTHER; note = N1-methylpseudouracil
  modified_base 691: mod_base = OTHER; note = N1-methylpseudouracil
  modified_base 697: mod_base = OTHER; note = N1-methylpseudouracil
  modified_base 705: mod_base = OTHER; note = N1-methylpseudouracil
  modified_base 706: mod_base = OTHER; note = N1-methylpseudouracil
  modified_base 709: mod_base = OTHER; note = N1-methylpseudouracil
  modified_base 711: mod_base = OTHER; note = N1-methylpseudouracil
  modified_base 715: mod_base = OTHER; note = N1-methylpseudouracil
  modified_base 716: mod_base = OTHER; note = N1-methylpseudouracil
  modified_base 724: mod_base = OTHER; note = N1-methylpseudouracil
  modified_base 730: mod_base = OTHER; note = N1-methylpseudouracil
  modified_base 734: mod_base = OTHER; note = N1-methylpseudouracil
  modified_base 736: mod_base = OTHER; note = N1-methylpseudouracil
  modified_base 739: mod_base = OTHER; note = N1-methylpseudouracil
  modified_base 742: mod_base = OTHER; note = N1-methylpseudouracil
  modified_base 748: mod_base = OTHER; note = N1-methylpseudouracil
  modified_base 751: mod_base = OTHER; note = N1-methylpseudouracil
  modified_base 753: mod_base = OTHER; note = N1-methylpseudouracil
  modified_base 760: mod_base = OTHER; note = N1-methylpseudouracil
  modified_base 763: mod_base = OTHER; note = N1-methylpseudouracil
  modified_base 771: mod_base = OTHER; note = N1-methylpseudouracil
  modified_base 773: mod_base = OTHER; note = N1-methylpseudouracil
  modified_base 777: mod_base = OTHER; note = N1-methylpseudouracil
  modified_base 778: mod_base = OTHER; note = N1-methylpseudouracil
  modified_base 780: mod_base = OTHER; note = N1-methylpseudouracil
  modified_base 787: mod_base = OTHER; note = N1-methylpseudouracil
  modified_base 792: mod_base = OTHER; note = N1-methylpseudouracil
  modified_base 793: mod_base = OTHER; note = N1-methylpseudouracil
  modified_base 794: mod_base = OTHER; note = N1-methylpseudouracil
  modified_base 796: mod_base = OTHER; note = N1-methylpseudouracil
  modified_base 799: mod_base = OTHER; note = N1-methylpseudouracil
  modified_base 802: mod_base = OTHER; note = N1-methylpseudouracil
  modified_base 805: mod_base = OTHER; note = N1-methylpseudouracil
  modified_base 811: mod_base = OTHER; note = N1-methylpseudouracil
  modified_base 813: mod_base = OTHER; note = N1-methylpseudouracil
  modified_base 814: mod_base = OTHER; note = N1-methylpseudouracil
  modified_base 821: mod_base = OTHER; note = N1-methylpseudouracil
  modified_base 826: mod_base = OTHER; note = N1-methylpseudouracil
  modified_base 835: mod_base = OTHER; note = N1-methylpseudouracil
  modified_base 838: mod_base = OTHER; note = N1-methylpseudouracil
  modified_base 841: mod_base = OTHER; note = N1-methylpseudouracil
  modified_base 846: mod_base = OTHER; note = N1-methylpseudouracil
  modified_base 854: mod_base = OTHER; note = N1-methylpseudouracil
  modified_base 871: mod_base = OTHER; note = N1-methylpseudouracil
  modified_base 883: mod_base = OTHER; note = N1-methylpseudouracil
  modified_base 886: mod_base = OTHER; note = N1-methylpseudouracil
  modified_base 889: mod_base = OTHER; note = N1-methylpseudouracil
  modified_base 893: mod_base = OTHER; note = N1-methylpseudouracil
  modified_base 901: mod_base = OTHER; note = N1-methylpseudouracil
  modified_base 904: mod_base = OTHER; note = N1-methylpseudouracil
  modified_base 913: mod_base = OTHER; note = N1-methylpseudouracil
  modified_base 922: mod_base = OTHER; note = N1-methylpseudouracil
  modified_base 929: mod_base = OTHER; note = N1-methylpseudouracil
  modified_base 930: mod_base = OTHER; note = N1-methylpseudouracil
  modified_base 933: mod_base = OTHER; note = N1-methylpseudouracil
  modified_base 935: mod_base = OTHER; note = N1-methylpseudouracil
  modified_base 936: mod_base = OTHER; note = N1-methylpseudouracil
  modified_base 949: mod_base = OTHER; note = N1-methylpseudouracil
  modified_base 958: mod_base = OTHER; note = N1-methylpseudouracil
  modified_base 961: mod_base = OTHER; note = N1-methylpseudouracil
  modified_base 970: mod_base = OTHER; note = N1-methylpseudouracil
  modified_base 985: mod_base = OTHER; note = N1-methylpseudouracil
  modified_base 991: mod_base = OTHER; note = N1-methylpseudouracil
  modified_base 995: mod_base = OTHER; note = N1-methylpseudouracil
  modified_base 1008: mod_base = OTHER; note = N1-methylpseudouracil
  modified_base 1012: mod_base = OTHER; note = N1-methylpseudouracil
  modified_base 1017: mod_base = OTHER; note = N1-methylpseudouracil
  modified_base 1019: mod_base = OTHER; note = N1-methylpseudouracil
  modified_base 1020: mod_base = OTHER; note = N1-methylpseudouracil
  modified_base 1021: mod_base = OTHER; note = N1-methylpseudouracil
  modified_base 1026: mod_base = OTHER; note = N1-methylpseudouracil
  modified_base 1035: mod_base = OTHER; note = N1-methylpseudouracil
  modified_base 1036: mod_base = OTHER; note = N1-methylpseudouracil
  modified_base 1038: mod_base = OTHER; note = N1-methylpseudouracil
  modified_base 1039: mod_base = OTHER; note = N1-methylpseudouracil
  modified_base 1041: mod_base = OTHER; note = N1-methylpseudouracil
  modified_base 1042: mod_base = OTHER; note = N1-methylpseudouracil
  modified_base 1050: mod_base = OTHER; note = N1-methylpseudouracil
  modified_base 1051: mod_base = OTHER; note = N1-methylpseudouracil
  modified_base 1053: mod_base = OTHER; note = N1-methylpseudouracil
  modified_base 1054: mod_base = OTHER; note = N1-methylpseudouracil
  modified_base 1057: mod_base = OTHER; note = N1-methylpseudouracil
  modified_base 1060: mod_base = OTHER; note = N1-methylpseudouracil
  modified_base 1062: mod_base = OTHER; note = N1-methylpseudouracil
  modified_base 1063: mod_base = OTHER; note = N1-methylpseudouracil
  modified_base 1066: mod_base = OTHER; note = N1-methylpseudouracil
  modified_base 1072: mod_base = OTHER; note = N1-methylpseudouracil
  modified_base 1075: mod_base = OTHER; note = N1-methylpseudouracil
  modified_base 1080: mod_base = OTHER; note = N1-methylpseudouracil
  modified_base 1087: mod_base = OTHER; note = N1-methylpseudouracil
  modified_base 1090: mod_base = OTHER; note = N1-methylpseudouracil
  modified_base 1099: mod_base = OTHER; note = N1-methylpseudouracil
  modified_base 1102: mod_base = OTHER; note = N1-methylpseudouracil
  modified_base 1105: mod_base = OTHER; note = N1-methylpseudouracil
  modified_base 1114: mod_base = OTHER; note = N1-methylpseudouracil
  modified_base 1116: mod_base = OTHER; note = N1-methylpseudouracil
  modified_base 1117: mod_base = OTHER; note = N1-methylpseudouracil
  modified_base 1126: mod_base = OTHER; note = N1-methylpseudouracil
  modified_base 1127: mod_base = OTHER; note = N1-methylpseudouracil
  modified_base 1131: mod_base = OTHER; note = N1-methylpseudouracil
  modified_base 1132: mod_base = OTHER; note = N1-methylpseudouracil
  modified_base 1134: mod_base = OTHER; note = N1-methylpseudouracil
  modified_base 1138: mod_base = OTHER; note = N1-methylpseudouracil
  modified_base 1141: mod_base = OTHER; note = N1-methylpseudouracil
  modified_base 1144: mod_base = OTHER; note = N1-methylpseudouracil
  modified_base 1150: mod_base = OTHER; note = N1-methylpseudouracil
  modified_base 1156: mod_base = OTHER; note = N1-methylpseudouracil
  modified_base 1167: mod_base = OTHER; note = N1-methylpseudouracil
  modified_base 1168: mod_base = OTHER; note = N1-methylpseudouracil
  modified_base 1172: mod_base = OTHER; note = N1-methylpseudouracil
  modified_base 1173: mod_base = OTHER; note = N1-methylpseudouracil
  modified_base 1180: mod_base = OTHER; note = N1-methylpseudouracil
  modified_base 1187: mod_base = OTHER; note = N1-methylpseudouracil
  modified_base 1188: mod_base = OTHER; note = N1-methylpseudouracil
  modified_base 1191: mod_base = OTHER; note = N1-methylpseudouracil
  modified_base 1201: mod_base = OTHER; note = N1-methylpseudouracil
  modified_base 1210: mod_base = OTHER; note = N1-methylpseudouracil
  modified_base 1219: mod_base = OTHER; note = N1-methylpseudouracil
  modified_base 1227: mod_base = OTHER; note = N1-methylpseudouracil
  modified_base 1228: mod_base = OTHER; note = N1-methylpseudouracil
  modified_base 1229: mod_base = OTHER; note = N1-methylpseudouracil
  modified_base 1231: mod_base = OTHER; note = N1-methylpseudouracil
  modified_base 1245: mod_base = OTHER; note = N1-methylpseudouracil
  modified_base 1247: mod_base = OTHER; note = N1-methylpseudouracil
  modified_base 1255: mod_base = OTHER; note = N1-methylpseudouracil
  modified_base 1260: mod_base = OTHER; note = N1-methylpseudouracil
  modified_base 1267: mod_base = OTHER; note = N1-methylpseudouracil
  modified_base 1282: mod_base = OTHER; note = N1-methylpseudouracil
  modified_base 1285: mod_base = OTHER; note = N1-methylpseudouracil
  modified_base 1288: mod_base = OTHER; note = N1-methylpseudouracil
  modified_base 1297: mod_base = OTHER; note = N1-methylpseudouracil
  modified_base 1305: mod_base = OTHER; note = N1-methylpseudouracil
  modified_base 1306: mod_base = OTHER; note = N1-methylpseudouracil
  modified_base 1308: mod_base = OTHER; note = N1-methylpseudouracil
  modified_base 1320: mod_base = OTHER; note = N1-methylpseudouracil
  modified_base 1321: mod_base = OTHER; note = N1-methylpseudouracil
  modified_base 1330: mod_base = OTHER; note = N1-methylpseudouracil
  modified_base 1332: mod_base = OTHER; note = N1-methylpseudouracil
  modified_base 1333: mod_base = OTHER; note = N1-methylpseudouracil
  modified_base 1355: mod_base = OTHER; note = N1-methylpseudouracil
  modified_base 1386: mod_base = OTHER; note = N1-methylpseudouracil
  modified_base 1390: mod_base = OTHER; note = N1-methylpseudouracil
  modified_base 1392: mod_base = OTHER; note = N1-methylpseudouracil
  modified_base 1393: mod_base = OTHER; note = N1-methylpseudouracil
  modified_base 1395: mod_base = OTHER; note = N1-methylpseudouracil
  modified_base 1396: mod_base = OTHER; note = N1-methylpseudouracil
  modified_base 1404: mod_base = OTHER; note = N1-methylpseudouracil
  modified_base 1405: mod_base = OTHER; note = N1-methylpseudouracil
  modified_base 1406: mod_base = OTHER; note = N1-methylpseudouracil
  modified_base 1411: mod_base = OTHER; note = N1-methylpseudouracil
  modified_base 1414: mod_base = OTHER; note = N1-methylpseudouracil
  modified_base 1424: mod_base = OTHER; note = N1-methylpseudouracil
  modified_base 1426: mod_base = OTHER; note = N1-methylpseudouracil
  modified_base 1429: mod_base = OTHER; note = N1-methylpseudouracil
  modified_base 1438: mod_base = OTHER; note = N1-methylpseudouracil
  modified_base 1443: mod_base = OTHER; note = N1-methylpseudouracil
  modified_base 1444: mod_base = OTHER; note = N1-methylpseudouracil
  modified_base 1450: mod_base = OTHER; note = N1-methylpseudouracil
  modified_base 1465: mod_base = OTHER; note = N1-methylpseudouracil
  modified_base 1468: mod_base = OTHER; note = N1-methylpseudouracil
  modified_base 1474: mod_base = OTHER; note = N1-methylpseudouracil
  modified_base 1482: mod_base = OTHER; note = N1-methylpseudouracil
  modified_base 1484: mod_base = OTHER; note = N1-methylpseudouracil
  modified_base 1507: mod_base = OTHER; note = N1-methylpseudouracil
  modified_base 1510: mod_base = OTHER; note = N1-methylpseudouracil
  modified_base 1513: mod_base = OTHER; note = N1-methylpseudouracil
  modified_base 1516: mod_base = OTHER; note = N1-methylpseudouracil
  modified_base 1519: mod_base = OTHER; note = N1-methylpseudouracil
  modified_base 1522: mod_base = OTHER; note = N1-methylpseudouracil
  modified_base 1531: mod_base = OTHER; note = N1-methylpseudouracil
  modified_base 1552: mod_base = OTHER; note = N1-methylpseudouracil
  modified_base 1570: mod_base = OTHER; note = N1-methylpseudouracil
  modified_base 1572: mod_base = OTHER; note = N1-methylpseudouracil
  modified_base 1575: mod_base = OTHER; note = N1-methylpseudouracil
  modified_base 1576: mod_base = OTHER; note = N1-methylpseudouracil
  modified_base 1578: mod_base = OTHER; note = N1-methylpseudouracil
  modified_base 1581: mod_base = OTHER; note = N1-methylpseudouracil
  modified_base 1587: mod_base = OTHER; note = N1-methylpseudouracil
  modified_base 1588: mod_base = OTHER; note = N1-methylpseudouracil
  modified_base 1590: mod_base = OTHER; note = N1-methylpseudouracil
  modified_base 1593: mod_base = OTHER; note = N1-methylpseudouracil
  modified_base 1597: mod_base = OTHER; note = N1-methylpseudouracil
  modified_base 1600: mod_base = OTHER; note = N1-methylpseudouracil
  modified_base 1612: mod_base = OTHER; note = N1-methylpseudouracil
  modified_base 1624: mod_base = OTHER; note = N1-methylpseudouracil
  modified_base 1627: mod_base = OTHER; note = N1-methylpseudouracil
  modified_base 1629: mod_base = OTHER; note = N1-methylpseudouracil
  modified_base 1630: mod_base = OTHER; note = N1-methylpseudouracil
  modified_base 1636: mod_base = OTHER; note = N1-methylpseudouracil
  modified_base 1641: mod_base = OTHER; note = N1-methylpseudouracil
  modified_base 1650: mod_base = OTHER; note = N1-methylpseudouracil
  modified_base 1656: mod_base = OTHER; note = N1-methylpseudouracil
  modified_base 1666: mod_base = OTHER; note = N1-methylpseudouracil
  modified_base 1669: mod_base = OTHER; note = N1-methylpseudouracil
  modified_base 1677: mod_base = OTHER; note = N1-methylpseudouracil
  modified_base 1684: mod_base = OTHER; note = N1-methylpseudouracil
  modified_base 1696: mod_base = OTHER; note = N1-methylpseudouracil
  modified_base 1698: mod_base = OTHER; note = N1-methylpseudouracil
  modified_base 1704: mod_base = OTHER; note = N1-methylpseudouracil
  modified_base 1705: mod_base = OTHER; note = N1-methylpseudouracil
  modified_base 1706: mod_base = OTHER; note = N1-methylpseudouracil
  modified_base 1723: mod_base = OTHER; note = N1-methylpseudouracil
  modified_base 1724: mod_base = OTHER; note = N1-methylpseudouracil
  modified_base 1726: mod_base = OTHER; note = N1-methylpseudouracil
  modified_base 1729: mod_base = OTHER; note = N1-methylpseudouracil
  modified_base 1744: mod_base = OTHER; note = N1-methylpseudouracil
  modified_base 1750: mod_base = OTHER; note = N1-methylpseudouracil
  modified_base 1752: mod_base = OTHER; note = N1-methylpseudouracil
  modified_base 1757: mod_base = OTHER; note = N1-methylpseudouracil
  modified_base 1766: mod_base = OTHER; note = N1-methylpseudouracil
  modified_base 1774: mod_base = OTHER; note = N1-methylpseudouracil
  modified_base 1776: mod_base = OTHER; note = N1-methylpseudouracil
  modified_base 1780: mod_base = OTHER; note = N1-methylpseudouracil
  modified_base 1790: mod_base = OTHER; note = N1-methylpseudouracil
  modified_base 1792: mod_base = OTHER; note = N1-methylpseudouracil
  modified_base 1794: mod_base = OTHER; note = N1-methylpseudouracil
  modified_base 1810: mod_base = OTHER; note = N1-methylpseudouracil
  modified_base 1812: mod_base = OTHER; note = N1-methylpseudouracil
  modified_base 1816: mod_base = OTHER; note = N1-methylpseudouracil
  modified_base 1819: mod_base = OTHER; note = N1-methylpseudouracil
  modified_base 1829: mod_base = OTHER; note = N1-methylpseudouracil
  modified_base 1830: mod_base = OTHER; note = N1-methylpseudouracil
  modified_base 1831: mod_base = OTHER; note = N1-methylpseudouracil
  modified_base 1832: mod_base = OTHER; note = N1-methylpseudouracil
  modified_base 1836: mod_base = OTHER; note = N1-methylpseudouracil
  modified_base 1840: mod_base = OTHER; note = N1-methylpseudouracil
  modified_base 1846: mod_base = OTHER; note = N1-methylpseudouracil
  modified_base 1849: mod_base = OTHER; note = N1-methylpseudouracil
  modified_base 1864: mod_base = OTHER; note = N1-methylpseudouracil
  modified_base 1866: mod_base = OTHER; note = N1-methylpseudouracil
  modified_base 1867: mod_base = OTHER; note = N1-methylpseudouracil
  modified_base 1872: mod_base = OTHER; note = N1-methylpseudouracil
  modified_base 1875: mod_base = OTHER; note = N1-methylpseudouracil
  modified_base 1879: mod_base = OTHER; note = N1-methylpseudouracil
  modified_base 1881: mod_base = OTHER; note = N1-methylpseudouracil
  modified_base 1883: mod_base = OTHER; note = N1-methylpseudouracil
  modified_base 1888: mod_base = OTHER; note = N1-methylpseudouracil
  modified_base 1891: mod_base = OTHER; note = N1-methylpseudouracil
  modified_base 1909: mod_base = OTHER; note = N1-methylpseudouracil
  modified_base 1912: mod_base = OTHER; note = N1-methylpseudouracil
  modified_base 1915: mod_base = OTHER; note = N1-methylpseudouracil
  modified_base 1927: mod_base = OTHER; note = N1-methylpseudouracil
  modified_base 1934: mod_base = OTHER; note = N1-methylpseudouracil
  modified_base 1936: mod_base = OTHER; note = N1-methylpseudouracil
  modified_base 1954: mod_base = OTHER; note = N1-methylpseudouracil
  modified_base 1957: mod_base = OTHER; note = N1-methylpseudouracil
  modified_base 1960: mod_base = OTHER; note = N1-methylpseudouracil
  modified_base 1963: mod_base = OTHER; note = N1-methylpseudouracil
  modified_base 1974: mod_base = OTHER; note = N1-methylpseudouracil
  modified_base 1980: mod_base = OTHER; note = N1-methylpseudouracil
  modified_base 1983: mod_base = OTHER; note = N1-methylpseudouracil
  modified_base 1984: mod_base = OTHER; note = N1-methylpseudouracil
  modified_base 1986: mod_base = OTHER; note = N1-methylpseudouracil
  modified_base 1995: mod_base = OTHER; note = N1-methylpseudouracil
  modified_base 1996: mod_base = OTHER; note = N1-methylpseudouracil
  modified_base 2005: mod_base = OTHER; note = N1-methylpseudouracil
  modified_base 2014: mod_base = OTHER; note = N1-methylpseudouracil
  modified_base 2025: mod_base = OTHER; note = N1-methylpseudouracil
  modified_base 2026: mod_base = OTHER; note = N1-methylpseudouracil
  modified_base 2031: mod_base = OTHER; note = N1-methylpseudouracil
  modified_base 2038: mod_base = OTHER; note = N1-methylpseudouracil
  modified_base 2041: mod_base = OTHER; note = N1-methylpseudouracil
  modified_base 2046: mod_base = OTHER; note = N1-methylpseudouracil
  modified_base 2051: mod_base = OTHER; note = N1-methylpseudouracil
  modified_base 2055: mod_base = OTHER; note = N1-methylpseudouracil
  modified_base 2056: mod_base = OTHER; note = N1-methylpseudouracil
  modified_base 2064: mod_base = OTHER; note = N1-methylpseudouracil
  modified_base 2065: mod_base = OTHER; note = N1-methylpseudouracil
  modified_base 2067: mod_base = OTHER; note = N1-methylpseudouracil
  modified_base 2085: mod_base = OTHER; note = N1-methylpseudouracil
  modified_base 2089: mod_base = OTHER; note = N1-methylpseudouracil
  modified_base 2090: mod_base = OTHER; note = N1-methylpseudouracil
  modified_base 2092: mod_base = OTHER; note = N1-methylpseudouracil
  modified_base 2104: mod_base = OTHER; note = N1-methylpseudouracil
  modified_base 2112: mod_base = OTHER; note = N1-methylpseudouracil
  modified_base 2113: mod_base = OTHER; note = N1-methylpseudouracil
  modified_base 2115: mod_base = OTHER; note = N1-methylpseudouracil
  modified_base 2119: mod_base = OTHER; note = N1-methylpseudouracil
  modified_base 2137: mod_base = OTHER; note = N1-methylpseudouracil
  modified_base 2142: mod_base = OTHER; note = N1-methylpseudouracil
  modified_base 2166: mod_base = OTHER; note = N1-methylpseudouracil
  modified_base 2167: mod_base = OTHER; note = N1-methylpseudouracil
  modified_base 2184: mod_base = OTHER; note = N1-methylpseudouracil
  modified_base 2185: mod_base = OTHER; note = N1-methylpseudouracil
  modified_base 2205: mod_base = OTHER; note = N1-methylpseudouracil
  modified_base 2209: mod_base = OTHER; note = N1-methylpseudouracil
  modified_base 2212: mod_base = OTHER; note = N1-methylpseudouracil
  modified_base 2221: mod_base = OTHER; note = N1-methylpseudouracil
  modified_base 2230: mod_base = OTHER; note = N1-methylpseudouracil
  modified_base 2238: mod_base = OTHER; note = N1-methylpseudouracil
  modified_base 2239: mod_base = OTHER; note = N1-methylpseudouracil
  modified_base 2245: mod_base = OTHER; note = N1-methylpseudouracil
  modified_base 2248: mod_base = OTHER; note = N1-methylpseudouracil
  modified_base 2261: mod_base = OTHER; note = N1-methylpseudouracil
  modified_base 2263: mod_base = OTHER; note = N1-methylpseudouracil
  modified_base 2269: mod_base = OTHER; note = N1-methylpseudouracil
  modified_base 2278: mod_base = OTHER; note = N1-methylpseudouracil
  modified_base 2302: mod_base = OTHER; note = N1-methylpseudouracil
  modified_base 2314: mod_base = OTHER; note = N1-methylpseudouracil
  modified_base 2316: mod_base = OTHER; note = N1-methylpseudouracil
  modified_base 2320: mod_base = OTHER; note = N1-methylpseudouracil
  modified_base 2323: mod_base = OTHER; note = N1-methylpseudouracil
  modified_base 2350: mod_base = OTHER; note = N1-methylpseudouracil
  modified_base 2353: mod_base = OTHER; note = N1-methylpseudouracil
  modified_base 2362: mod_base = OTHER; note = N1-methylpseudouracil
  modified_base 2364: mod_base = OTHER; note = N1-methylpseudouracil
  modified_base 2368: mod_base = OTHER; note = N1-methylpseudouracil
  modified_base 2371: mod_base = OTHER; note = N1-methylpseudouracil
  modified_base 2373: mod_base = OTHER; note = N1-methylpseudouracil
  modified_base 2378: mod_base = OTHER; note = N1-methylpseudouracil
  modified_base 2389: mod_base = OTHER; note = N1-methylpseudouracil
  modified_base 2413: mod_base = OTHER; note = N1-methylpseudouracil
  modified_base 2416: mod_base = OTHER; note = N1-methylpseudouracil
  modified_base 2422: mod_base = OTHER; note = N1-methylpseudouracil
  modified_base 2425: mod_base = OTHER; note = N1-methylpseudouracil
  modified_base 2437: mod_base = OTHER; note = N1-methylpseudouracil
  modified_base 2453: mod_base = OTHER; note = N1-methylpseudouracil
  modified_base 2455: mod_base = OTHER; note = N1-methylpseudouracil
  modified_base 2468: mod_base = OTHER; note = N1-methylpseudouracil
  modified_base 2488: mod_base = OTHER; note = N1-methylpseudouracil
  modified_base 2494: mod_base = OTHER; note = N1-methylpseudouracil
  modified_base 2498: mod_base = OTHER; note = N1-methylpseudouracil
  modified_base 2512: mod_base = OTHER; note = N1-methylpseudouracil
  modified_base 2521: mod_base = OTHER; note = N1-methylpseudouracil
  modified_base 2527: mod_base = OTHER; note = N1-methylpseudouracil
  modified_base 2529: mod_base = OTHER; note = N1-methylpseudouracil
  modified_base 2542: mod_base = OTHER; note = N1-methylpseudouracil
  modified_base 2560: mod_base = OTHER; note = N1-methylpseudouracil
  modified_base 2566: mod_base = OTHER; note = N1-methylpseudouracil
  modified_base 2578: mod_base = OTHER; note = N1-methylpseudouracil
  modified_base 2593: mod_base = OTHER; note = N1-methylpseudouracil
  modified_base 2601: mod_base = OTHER; note = N1-methylpseudouracil
  modified_base 2604: mod_base = OTHER; note = N1-methylpseudouracil
  modified_base 2605: mod_base = OTHER; note = N1-methylpseudouracil
  modified_base 2607: mod_base = OTHER; note = N1-methylpseudouracil
  modified_base 2608: mod_base = OTHER; note = N1-methylpseudouracil
  modified_base 2617: mod_base = OTHER; note = N1-methylpseudouracil
  modified_base 2622: mod_base = OTHER; note = N1-methylpseudouracil
  modified_base 2626: mod_base = OTHER; note = N1-methylpseudouracil
  modified_base 2635: mod_base = OTHER; note = N1-methylpseudouracil
  modified_base 2643: mod_base = OTHER; note = N1-methylpseudouracil
  modified_base 2652: mod_base = OTHER; note = N1-methylpseudouracil
  modified_base 2656: mod_base = OTHER; note = N1-methylpseudouracil
  modified_base 2661: mod_base = OTHER; note = N1-methylpseudouracil
  modified_base 2665: mod_base = OTHER; note = N1-methylpseudouracil
  modified_base 2671: mod_base = OTHER; note = N1-methylpseudouracil
  modified_base 2683: mod_base = OTHER; note = N1-methylpseudouracil
  modified_base 2686: mod_base = OTHER; note = N1-methylpseudouracil
  modified_base 2688: mod_base = OTHER; note = N1-methylpseudouracil
  modified_base 2689: mod_base = OTHER; note = N1-methylpseudouracil
  modified_base 2692: mod_base = OTHER; note = N1-methylpseudouracil
  modified_base 2695: mod_base = OTHER; note = N1-methylpseudouracil
  modified_base 2698: mod_base = OTHER; note = N1-methylpseudouracil
  modified_base 2700: mod_base = OTHER; note = N1-methylpseudouracil
  modified_base 2703: mod_base = OTHER; note = N1-methylpseudouracil
  modified_base 2707: mod_base = OTHER; note = N1-methylpseudouracil
  modified_base 2710: mod_base = OTHER; note = N1-methylpseudouracil
  modified_base 2713: mod_base = OTHER; note = N1-methylpseudouracil
  modified_base 2715: mod_base = OTHER; note = N1-methylpseudouracil
  modified_base 2716: mod_base = OTHER; note = N1-methylpseudouracil
  modified_base 2718: mod_base = OTHER; note = N1-methylpseudouracil
  modified_base 2719: mod_base = OTHER; note = N1-methylpseudouracil
  modified_base 2728: mod_base = OTHER; note = N1-methylpseudouracil
  modified_base 2736: mod_base = OTHER; note = N1-methylpseudouracil
  modified_base 2740: mod_base = OTHER; note = N1-methylpseudouracil
  modified_base 2743: mod_base = OTHER; note = N1-methylpseudouracil
  modified_base 2746: mod_base = OTHER; note = N1-methylpseudouracil
  modified_base 2749: mod_base = OTHER; note = N1-methylpseudouracil
  modified_base 2751: mod_base = OTHER; note = N1-methylpseudouracil
  modified_base 2755: mod_base = OTHER; note = N1-methylpseudouracil
  modified_base 2758: mod_base = OTHER; note = N1-methylpseudouracil
  modified_base 2765: mod_base = OTHER; note = N1-methylpseudouracil
  modified_base 2773: mod_base = OTHER; note = N1-methylpseudouracil
  modified_base 2790: mod_base = OTHER; note = N1-methylpseudouracil
  modified_base 2814: mod_base = OTHER; note = N1-methylpseudouracil
  modified_base 2821: mod_base = OTHER; note = N1-methylpseudouracil
  modified_base 2824: mod_base = OTHER; note = N1-methylpseudouracil
  modified_base 2827: mod_base = OTHER; note = N1-methylpseudouracil
  modified_base 2832: mod_base = OTHER; note = N1-methylpseudouracil
  modified_base 2844: mod_base = OTHER; note = N1-methylpseudouracil
  modified_base 2847: mod_base = OTHER; note = N1-methylpseudouracil
  modified_base 2851: mod_base = OTHER; note = N1-methylpseudouracil
  modified_base 2853: mod_base = OTHER; note = N1-methylpseudouracil
  modified_base 2854: mod_base = OTHER; note = N1-methylpseudouracil
  modified_base 2856: mod_base = OTHER; note = N1-methylpseudouracil
  modified_base 2860: mod_base = OTHER; note = N1-methylpseudouracil
  modified_base 2862: mod_base = OTHER; note = N1-methylpseudouracil
  modified_base 2866: mod_base = OTHER; note = N1-methylpseudouracil
  modified_base 2872: mod_base = OTHER; note = N1-methylpseudouracil
  modified_base 2884: mod_base = OTHER; note = N1-methylpseudouracil
  modified_base 2887: mod_base = OTHER; note = N1-methylpseudouracil
  modified_base 2893: mod_base = OTHER; note = N1-methylpseudouracil
  modified_base 2898: mod_base = OTHER; note = N1-methylpseudouracil
  modified_base 2899: mod_base = OTHER; note = N1-methylpseudouracil
  modified_base 2901: mod_base = OTHER; note = N1-methylpseudouracil
  modified_base 2902: mod_base = OTHER; note = N1-methylpseudouracil
  modified_base 2911: mod_base = OTHER; note = N1-methylpseudouracil
  modified_base 2915: mod_base = OTHER; note = N1-methylpseudouracil
  modified_base 2917: mod_base = OTHER; note = N1-methylpseudouracil
  modified_base 2920: mod_base = OTHER; note = N1-methylpseudouracil
  modified_base 2929: mod_base = OTHER; note = N1-methylpseudouracil
  modified_base 2932: mod_base = OTHER; note = N1-methylpseudouracil
  modified_base 2938: mod_base = OTHER; note = N1-methylpseudouracil
  modified_base 2947: mod_base = OTHER; note = N1-methylpseudouracil
  modified_base 2950: mod_base = OTHER; note = N1-methylpseudouracil
  modified_base 2962: mod_base = OTHER; note = N1-methylpseudouracil
  modified_base 2965: mod_base = OTHER; note = N1-methylpseudouracil
  modified_base 2974: mod_base = OTHER; note = N1-methylpseudouracil
  modified_base 2977: mod_base = OTHER; note = N1-methylpseudouracil
  modified_base 2984: mod_base = OTHER; note = N1-methylpseudouracil
  modified_base 2989: mod_base = OTHER; note = N1-methylpseudouracil
  modified_base 2991: mod_base = OTHER; note = N1-methylpseudouracil
  modified_base 2998: mod_base = OTHER; note = N1-methylpseudouracil
  modified_base 3007: mod_base = OTHER; note = N1-methylpseudouracil
  modified_base 3022: mod_base = OTHER; note = N1-methylpseudouracil
  modified_base 3025: mod_base = OTHER; note = N1-methylpseudouracil
  modified_base 3033: mod_base = OTHER; note = N1-methylpseudouracil
  modified_base 3034: mod_base = OTHER; note = N1-methylpseudouracil
  modified_base 3046: mod_base = OTHER; note = N1-methylpseudouracil
  modified_base 3052: mod_base = OTHER; note = N1-methylpseudouracil
  modified_base 3053: mod_base = OTHER; note = N1-methylpseudouracil
  modified_base 3055: mod_base = OTHER; note = N1-methylpseudouracil
  modified_base 3062: mod_base = OTHER; note = N1-methylpseudouracil
  modified_base 3064: mod_base = OTHER; note = N1-methylpseudouracil
  modified_base 3067: mod_base = OTHER; note = N1-methylpseudouracil
  modified_base 3073: mod_base = OTHER; note = N1-methylpseudouracil
  modified_base 3079: mod_base = OTHER; note = N1-methylpseudouracil
  modified_base 3081: mod_base = OTHER; note = N1-methylpseudouracil
  modified_base 3082: mod_base = OTHER; note = N1-methylpseudouracil
  modified_base 3087: mod_base = OTHER; note = N1-methylpseudouracil
  modified_base 3088: mod_base = OTHER; note = N1-methylpseudouracil
  modified_base 3091: mod_base = OTHER; note = N1-methylpseudouracil
  modified_base 3097: mod_base = OTHER; note = N1-methylpseudouracil
  modified_base 3100: mod_base = OTHER; note = N1-methylpseudouracil
  modified_base 3103: mod_base = OTHER; note = N1-methylpseudouracil
  modified_base 3106: mod_base = OTHER; note = N1-methylpseudouracil
  modified_base 3109: mod_base = OTHER; note = N1-methylpseudouracil
  modified_base 3112: mod_base = OTHER; note = N1-methylpseudouracil
  modified_base 3121: mod_base = OTHER; note = N1-methylpseudouracil
  modified_base 3127: mod_base = OTHER; note = N1-methylpseudouracil
  modified_base 3130: mod_base = OTHER; note = N1-methylpseudouracil
  modified_base 3136: mod_base = OTHER; note = N1-methylpseudouracil
  modified_base 3139: mod_base = OTHER; note = N1-methylpseudouracil
  modified_base 3147: mod_base = OTHER; note = N1-methylpseudouracil
  modified_base 3151: mod_base = OTHER; note = N1-methylpseudouracil
  modified_base 3153: mod_base = OTHER; note = N1-methylpseudouracil
  modified_base 3154: mod_base = OTHER; note = N1-methylpseudouracil
  modified_base 3157: mod_base = OTHER; note = N1-methylpseudouracil
  modified_base 3166: mod_base = OTHER; note = N1-methylpseudouracil
  modified_base 3172: mod_base = OTHER; note = N1-methylpseudouracil
  modified_base 3175: mod_base = OTHER; note = N1-methylpseudouracil
  modified_base 3178: mod_base = OTHER; note = N1-methylpseudouracil
  modified_base 3183: mod_base = OTHER; note = N1-methylpseudouracil
  modified_base 3184: mod_base = OTHER; note = N1-methylpseudouracil
  modified_base 3187: mod_base = OTHER; note = N1-methylpseudouracil
  modified_base 3190: mod_base = OTHER; note = N1-methylpseudouracil
  modified_base 3193: mod_base = OTHER; note = N1-methylpseudouracil
  modified_base 3201: mod_base = OTHER; note = N1-methylpseudouracil
  modified_base 3204: mod_base = OTHER; note = N1-methylpseudouracil
  modified_base 3205: mod_base = OTHER; note = N1-methylpseudouracil
  modified_base 3208: mod_base = OTHER; note = N1-methylpseudouracil
  modified_base 3216: mod_base = OTHER; note = N1-methylpseudouracil
  modified_base 3226: mod_base = OTHER; note = N1-methylpseudouracil
  modified_base 3235: mod_base = OTHER; note = N1-methylpseudouracil
  modified_base 3259: mod_base = OTHER; note = N1-methylpseudouracil
  modified_base 3261: mod_base = OTHER; note = N1-methylpseudouracil
  modified_base 3262: mod_base = OTHER; note = N1-methylpseudouracil
  modified_base 3271: mod_base = OTHER; note = N1-methylpseudouracil
  modified_base 3274: mod_base = OTHER; note = N1-methylpseudouracil
  modified_base 3278: mod_base = OTHER; note = N1-methylpseudouracil
  modified_base 3283: mod_base = OTHER; note = N1-methylpseudouracil
  modified_base 3292: mod_base = OTHER; note = N1-methylpseudouracil
  modified_base 3294: mod_base = OTHER; note = N1-methylpseudouracil
  modified_base 3301: mod_base = OTHER; note = N1-methylpseudouracil
  modified_base 3309: mod_base = OTHER; note = N1-methylpseudouracil
  modified_base 3310: mod_base = OTHER; note = N1-methylpseudouracil
  modified_base 3324: mod_base = OTHER; note = N1-methylpseudouracil
  modified_base 3327: mod_base = OTHER; note = N1-methylpseudouracil
  modified_base 3328: mod_base = OTHER; note = N1-methylpseudouracil
  modified_base 3337: mod_base = OTHER; note = N1-methylpseudouracil
  modified_base 3339: mod_base = OTHER; note = N1-methylpseudouracil
  modified_base 3340: mod_base = OTHER; note = N1-methylpseudouracil
  modified_base 3350: mod_base = OTHER; note = N1-methylpseudouracil
  modified_base 3352: mod_base = OTHER; note = N1-methylpseudouracil
  modified_base 3358: mod_base = OTHER; note = N1-methylpseudouracil
  modified_base 3372: mod_base = OTHER; note = N1-methylpseudouracil
  modified_base 3375: mod_base = OTHER; note = N1-methylpseudouracil
  modified_base 3376: mod_base = OTHER; note = N1-methylpseudouracil
  modified_base 3379: mod_base = OTHER; note = N1-methylpseudouracil
  modified_base 3381: mod_base = OTHER; note = N1-methylpseudouracil
  modified_base 3385: mod_base = OTHER; note = N1-methylpseudouracil
  modified_base 3394: mod_base = OTHER; note = N1-methylpseudouracil
  modified_base 3399: mod_base = OTHER; note = N1-methylpseudouracil
  modified_base 3402: mod_base = OTHER; note = N1-methylpseudouracil
  modified_base 3403: mod_base = OTHER; note = N1-methylpseudouracil
  modified_base 3409: mod_base = OTHER; note = N1-methylpseudouracil
  modified_base 3415: mod_base = OTHER; note = N1-methylpseudouracil
  modified_base 3421: mod_base = OTHER; note = N1-methylpseudouracil
  modified_base 3424: mod_base = OTHER; note = N1-methylpseudouracil
  modified_base 3426: mod_base = OTHER; note = N1-methylpseudouracil
  modified_base 3427: mod_base = OTHER; note = N1-methylpseudouracil
  modified_base 3430: mod_base = OTHER; note = N1-methylpseudouracil
  modified_base 3433: mod_base = OTHER; note = N1-methylpseudouracil
  modified_base 3435: mod_base = OTHER; note = N1-methylpseudouracil
  modified_base 3436: mod_base = OTHER; note = N1-methylpseudouracil
  modified_base 3438: mod_base = OTHER; note = N1-methylpseudouracil
  modified_base 3439: mod_base = OTHER; note = N1-methylpseudouracil
  modified_base 3442: mod_base = OTHER; note = N1-methylpseudouracil
  modified_base 3448: mod_base = OTHER; note = N1-methylpseudouracil
  modified_base 3453: mod_base = OTHER; note = N1-methylpseudouracil
  modified_base 3454: mod_base = OTHER; note = N1-methylpseudouracil
  modified_base 3457: mod_base = OTHER; note = N1-methylpseudouracil
  modified_base 3459: mod_base = OTHER; note = N1-methylpseudouracil
  modified_base 3463: mod_base = OTHER; note = N1-methylpseudouracil
  modified_base 3466: mod_base = OTHER; note = N1-methylpseudouracil
  modified_base 3493: mod_base = OTHER; note = N1-methylpseudouracil
  modified_base 3499: mod_base = OTHER; note = N1-methylpseudouracil
  modified_base 3502: mod_base = OTHER; note = N1-methylpseudouracil
  modified_base 3505: mod_base = OTHER; note = N1-methylpseudouracil
  modified_base 3511: mod_base = OTHER; note = N1-methylpseudouracil
  modified_base 3517: mod_base = OTHER; note = N1-methylpseudouracil
  modified_base 3521: mod_base = OTHER; note = N1-methylpseudouracil
  modified_base 3523: mod_base = OTHER; note = N1-methylpseudouracil
  modified_base 3526: mod_base = OTHER; note = N1-methylpseudouracil
  modified_base 3535: mod_base = OTHER; note = N1-methylpseudouracil
  modified_base 3540: mod_base = OTHER; note = N1-methylpseudouracil
  modified_base 3547: mod_base = OTHER; note = N1-methylpseudouracil
  modified_base 3559: mod_base = OTHER; note = N1-methylpseudouracil
  modified_base 3565: mod_base = OTHER; note = N1-methylpseudouracil
  modified_base 3574: mod_base = OTHER; note = N1-methylpseudouracil
  modified_base 3577: mod_base = OTHER; note = N1-methylpseudouracil
  modified_base 3582: mod_base = OTHER; note = N1-methylpseudouracil
  modified_base 3586: mod_base = OTHER; note = N1-methylpseudouracil
  modified_base 3588: mod_base = OTHER; note = N1-methylpseudouracil
  modified_base 3595: mod_base = OTHER; note = N1-methylpseudouracil
  modified_base 3597: mod_base = OTHER; note = N1-methylpseudouracil
  modified_base 3598: mod_base = OTHER; note = N1-methylpseudouracil
  modified_base 3603: mod_base = OTHER; note = N1-methylpseudouracil
  modified_base 3604: mod_base = OTHER; note = N1-methylpseudouracil
  modified_base 3607: mod_base = OTHER; note = N1-methylpseudouracil
  modified_base 3613: mod_base = OTHER; note = N1-methylpseudouracil
  modified_base 3651: mod_base = OTHER; note = N1-methylpseudouracil
  modified_base 3667: mod_base = OTHER; note = N1-methylpseudouracil
  modified_base 3676: mod_base = OTHER; note = N1-methylpseudouracil
  modified_base 3679: mod_base = OTHER; note = N1-methylpseudouracil
  modified_base 3682: mod_base = OTHER; note = N1-methylpseudouracil
  modified_base 3683: mod_base = OTHER; note = N1-methylpseudouracil
  modified_base 3685: mod_base = OTHER; note = N1-methylpseudouracil
  modified_base 3700: mod_base = OTHER; note = N1-methylpseudouracil
  modified_base 3715: mod_base = OTHER; note = N1-methylpseudouracil
  modified_base 3717: mod_base = OTHER; note = N1-methylpseudouracil
  modified_base 3722: mod_base = OTHER; note = N1-methylpseudouracil
  modified_base 3723: mod_base = OTHER; note = N1-methylpseudouracil
  modified_base 3736: mod_base = OTHER; note = N1-methylpseudouracil
  modified_base 3742: mod_base = OTHER; note = N1-methylpseudouracil
  modified_base 3751: mod_base = OTHER; note = N1-methylpseudouracil
  modified_base 3762: mod_base = OTHER; note = N1-methylpseudouracil
  modified_base 3784: mod_base = OTHER; note = N1-methylpseudouracil
  modified_base 3787: mod_base = OTHER; note = N1-methylpseudouracil
  modified_base 3796: mod_base = OTHER; note = N1-methylpseudouracil
  modified_base 3801: mod_base = OTHER; note = N1-methylpseudouracil
  modified_base 3802: mod_base = OTHER; note = N1-methylpseudouracil
  modified_base 3804: mod_base = OTHER; note = N1-methylpseudouracil
  modified_base 3808: mod_base = OTHER; note = N1-methylpseudouracil
  modified_base 3809: mod_base = OTHER; note = N1-methylpseudouracil
  modified_base 3815: mod_base = OTHER; note = N1-methylpseudouracil
  modified_base 3826: mod_base = OTHER; note = N1-methylpseudouracil
  modified_base 3832: mod_base = OTHER; note = N1-methylpseudouracil
  modified_base 3834: mod_base = OTHER; note = N1-methylpseudouracil
  modified_base 3835: mod_base = OTHER; note = N1-methylpseudouracil
  modified_base 3851: mod_base = OTHER; note = N1-methylpseudouracil
  modified_base 3865: mod_base = OTHER; note = N1-methylpseudouracil
  modified_base 3868: mod_base = OTHER; note = N1-methylpseudouracil
  modified_base 3870: mod_base = OTHER; note = N1-methylpseudouracil
  modified_base 3876: mod_base = OTHER; note = N1-methylpseudouracil
  modified_base 3877: mod_base = OTHER; note = N1-methylpseudouracil
  modified_base 3880: mod_base = OTHER; note = N1-methylpseudouracil
  modified_base 3886: mod_base = OTHER; note = N1-methylpseudouracil
  modified_base 3889: mod_base = OTHER; note = N1-methylpseudouracil
  modified_base 3907: mod_base = OTHER; note = N1-methylpseudouracil
  modified_base 3913: mod_base = OTHER; note = N1-methylpseudouracil
  modified_base 3922: mod_base = OTHER; note = N1-methylpseudouracil
  modified_base 3927: mod_base = OTHER; note = N1-methylpseudouracil
  modified_base 3937: mod_base = OTHER; note = N1-methylpseudouracil
  modified_base 3943: mod_base = OTHER; note = N1-methylpseudouracil
  modified_base 3951: mod_base = OTHER; note = N1-methylpseudouracil
  modified_base 3963: mod_base = OTHER; note = N1-methylpseudouracil
  modified_base 3964: mod_base = OTHER; note = N1-methylpseudouracil
  modified_base 3970: mod_base = OTHER; note = N1-methylpseudouracil
  modified_base 3973: mod_base = OTHER; note = N1-methylpseudouracil
  modified_base 3985: mod_base = OTHER; note = N1-methylpseudouracil
  modified_base 3987: mod_base = OTHER; note = N1-methylpseudouracil
  modified_base 3988: mod_base = OTHER; note = N1-methylpseudouracil
  modified_base 3989: mod_base = OTHER; note = N1-methylpseudouracil
  modified_base 3991: mod_base = OTHER; note = N1-methylpseudouracil
  modified_base 3992: mod_base = OTHER; note = N1-methylpseudouracil
  modified_base 3993: mod_base = OTHER; note = N1-methylpseudouracil
  modified_base 3994: mod_base = OTHER; note = N1-methylpseudouracil
  modified_base 3996: mod_base = OTHER; note = N1-methylpseudouracil
  modified_base 3998: mod_base = OTHER; note = N1-methylpseudouracil
  modified_base 4005: mod_base = OTHER; note = N1-methylpseudouracil
  modified_base 4006: mod_base = OTHER; note = N1-methylpseudouracil
  modified_base 4007: mod_base = OTHER; note = N1-methylpseudouracil
  modified_base 4018: mod_base = OTHER; note = N1-methylpseudouracil
  modified_base 4026: mod_base = OTHER; note = N1-methylpseudouracil
  modified_base 4035: mod_base = OTHER; note = N1-methylpseudouracil
  modified_base 4038: mod_base = OTHER; note = N1-methylpseudouracil
  modified_base 4051: mod_base = OTHER; note = N1-methylpseudouracil
  modified_base 4053: mod_base = OTHER; note = N1-methylpseudouracil
  modified_base 4060: mod_base = OTHER; note = N1-methylpseudouracil
  modified_base 4072: mod_base = OTHER; note = N1-methylpseudouracil
  modified_base 4078: mod_base = OTHER; note = N1-methylpseudouracil
  modified_base 4083: mod_base = OTHER; note = N1-methylpseudouracil
  modified_base 4087: mod_base = OTHER; note = N1-methylpseudouracil
  modified_base 4090: mod_base = OTHER; note = N1-methylpseudouracil
  modified_base 4098: mod_base = OTHER; note = N1-methylpseudouracil
  modified_base 4099: mod_base = OTHER; note = N1-methylpseudouracil
  modified_base 4111: mod_base = OTHER; note = N1-methylpseudouracil
  modified_base 4116: mod_base = OTHER; note = N1-methylpseudouracil
  modified_base 4117: mod_base = OTHER; note = N1-methylpseudouracil
  modified_base 4120: mod_base = OTHER; note = N1-methylpseudouracil
  modified_base 4123: mod_base = OTHER; note = N1-methylpseudouracil
  modified_base 4126: mod_base = OTHER; note = N1-methylpseudouracil
  modified_base 4137: mod_base = OTHER; note = N1-methylpseudouracil
  modified_base 4141: mod_base = OTHER; note = N1-methylpseudouracil
  modified_base 4144: mod_base = OTHER; note = N1-methylpseudouracil
  modified_base 4165: mod_base = OTHER; note = N1-methylpseudouracil
  modified_base 4168: mod_base = OTHER; note = N1-methylpseudouracil
  modified_base 4170: mod_base = OTHER; note = N1-methylpseudouracil
  modified_base 4174: mod_base = OTHER; note = N1-methylpseudouracil
  modified_base 4186: mod_base = OTHER; note = N1-methylpseudouracil
  modified_base 4189: mod_base = OTHER; note = N1-methylpseudouracil
  modified_base 4204: mod_base = OTHER; note = N1-methylpseudouracil
  modified_base 4207: mod_base = OTHER; note = N1-methylpseudouracil
  modified_base 4210: mod_base = OTHER; note = N1-methylpseudouracil
  modified_base 4213: mod_base = OTHER; note = N1-methylpseudouracil
  modified_base 4224: mod_base = OTHER; note = N1-methylpseudouracil
  modified_base 4234: mod_base = OTHER; note = N1-methylpseudouracil
  modified_base 4238: mod_base = OTHER; note = N1-methylpseudouracil
  modified_base 4243: mod_base = OTHER; note = N1-methylpseudouracil
  modified_base 4248: mod_base = OTHER; note = N1-methylpseudouracil
  modified_base 4255: mod_base = OTHER; note = N1-methylpseudouracil
  modified_base 4258: mod_base = OTHER; note = N1-methylpseudouracil
  modified_base 4270: mod_base = OTHER; note = N1-methylpseudouracil
  modified_base 4281: mod_base = OTHER; note = N1-methylpseudouracil
  modified_base 4282: mod_base = OTHER; note = N1-methylpseudouracil
  modified_base 4290: mod_base = OTHER; note = N1-methylpseudouracil
  modified_base 4297: mod_base = OTHER; note = N1-methylpseudouracil
  modified_base 4300: mod_base = OTHER; note = N1-methylpseudouracil
  modified_base 4303: mod_base = OTHER; note = N1-methylpseudouracil
  modified_base 4305: mod_base = OTHER; note = N1-methylpseudouracil
  modified_base 4318: mod_base = OTHER; note = N1-methylpseudouracil
  modified_base 4325: mod_base = OTHER; note = N1-methylpseudouracil
  modified_base 4327: mod_base = OTHER; note = N1-methylpseudouracil
  modified_base 4330: mod_base = OTHER; note = N1-methylpseudouracil
  modified_base 4335: mod_base = OTHER; note = N1-methylpseudouracil
  modified_base 4344: mod_base = OTHER; note = N1-methylpseudouracil
  modified_base 4345: mod_base = OTHER; note = N1-methylpseudouracil
  modified_base 4348: mod_base = OTHER; note = N1-methylpseudouracil
  modified_base 4351: mod_base = OTHER; note = N1-methylpseudouracil
  modified_base 4354: mod_base = OTHER; note = N1-methylpseudouracil
  modified_base 4369: mod_base = OTHER; note = N1-methylpseudouracil
  modified_base 4377: mod_base = OTHER; note = N1-methylpseudouracil
  modified_base 4383: mod_base = OTHER; note = N1-methylpseudouracil
  modified_base 4387: mod_base = OTHER; note = N1-methylpseudouracil
  modified_base 4396: mod_base = OTHER; note = N1-methylpseudouracil
  modified_base 4399: mod_base = OTHER; note = N1-methylpseudouracil
  modified_base 4414: mod_base = OTHER; note = N1-methylpseudouracil
  modified_base 4416: mod_base = OTHER; note = N1-methylpseudouracil
  modified_base 4417: mod_base = OTHER; note = N1-methylpseudouracil
  modified_base 4427: mod_base = OTHER; note = N1-methylpseudouracil
  modified_base 4429: mod_base = OTHER; note = N1-methylpseudouracil
  modified_base 4431: mod_base = OTHER; note = N1-methylpseudouracil
  modified_base 4433: mod_base = OTHER; note = N1-methylpseudouracil
  modified_base 4442: mod_base = OTHER; note = N1-methylpseudouracil
  modified_base 4447: mod_base = OTHER; note = N1-methylpseudouracil
  modified_base 4453: mod_base = OTHER; note = N1-methylpseudouracil
  modified_base 4455: mod_base = OTHER; note = N1-methylpseudouracil
  modified_base 4456: mod_base = OTHER; note = N1-methylpseudouracil
  modified_base 4460: mod_base = OTHER; note = N1-methylpseudouracil
  modified_base 4479: mod_base = OTHER; note = N1-methylpseudouracil
  modified_base 4485: mod_base = OTHER; note = N1-methylpseudouracil
  modified_base 4487: mod_base = OTHER; note = N1-methylpseudouracil
  modified_base 4498: mod_base = OTHER; note = N1-methylpseudouracil
  modified_base 4507: mod_base = OTHER; note = N1-methylpseudouracil
  modified_base 4531: mod_base = OTHER; note = N1-methylpseudouracil
  modified_base 4538: mod_base = OTHER; note = N1-methylpseudouracil
  modified_base 4546: mod_base = OTHER; note = N1-methylpseudouracil
  modified_base 4548: mod_base = OTHER; note = N1-methylpseudouracil
  modified_base 4554: mod_base = OTHER; note = N1-methylpseudouracil
  modified_base 4566: mod_base = OTHER; note = N1-methylpseudouracil
  modified_base 4575: mod_base = OTHER; note = N1-methylpseudouracil
  modified_base 4576: mod_base = OTHER; note = N1-methylpseudouracil
  modified_base 4578: mod_base = OTHER; note = N1-methylpseudouracil
  modified_base 4582: mod_base = OTHER; note = N1-methylpseudouracil
  modified_base 4583: mod_base = OTHER; note = N1-methylpseudouracil
  modified_base 4586: mod_base = OTHER; note = N1-methylpseudouracil
  modified_base 4589: mod_base = OTHER; note = N1-methylpseudouracil
  modified_base 4594: mod_base = OTHER; note = N1-methylpseudouracil
  modified_base 4597: mod_base = OTHER; note = N1-methylpseudouracil
  modified_base 4600: mod_base = OTHER; note = N1-methylpseudouracil
  modified_base 4611: mod_base = OTHER; note = N1-methylpseudouracil
  modified_base 4619: mod_base = OTHER; note = N1-methylpseudouracil
  modified_base 4627: mod_base = OTHER; note = N1-methylpseudouracil
  modified_base 4630: mod_base = OTHER; note = N1-methylpseudouracil
  modified_base 4632: mod_base = OTHER; note = N1-methylpseudouracil
  modified_base 4633: mod_base = OTHER; note = N1-methylpseudouracil
  modified_base 4634: mod_base = OTHER; note = N1-methylpseudouracil
  modified_base 4638: mod_base = OTHER; note = N1-methylpseudouracil
  modified_base 4643: mod_base = OTHER; note = N1-methylpseudouracil
  modified_base 4645: mod_base = OTHER; note = N1-methylpseudouracil
  modified_base 4649: mod_base = OTHER; note = N1-methylpseudouracil
ggaggaaatttttttttgatattataagagtttttttttgatattaagaaaatttttttttgatattagaagagtaagaagaaatataagaccccggcgccgccaccatgcagcggagccctctggagaaggccagcgtggtgagcaagctgttcttcagctggaccaggcccatcctgcgaaagggctacagacagaggctggagctgtccgacatctaccagattccatccgtggacagcgccgacaatctgagcgagaagctggagagggagtgggaccgcgagctggccagcaagaagaaccctaagctgatcaacgccctgcgccgctgcttcttctggaggttcatgttctacggcatcttcctgtacctgggcgaggtgaccaaggccgtccagcctctgctgctgggccgcatcatcgccagctacgatcccgacaacaaggaggaacgctccatcgccatctacctgggcatcggcctgtgtctgctgttcatcgtgcggaccctgctgctgcaccccgccatcttcggcctgcatcacatcggcatgcagatgaggatcgccatgttctccctgatctacaagaagaccctgaagctgtccagccgcgtgctggataagatcagcatcgggcagctggtgagcctgctgagcaacaacctgaacaagttcgacgaggggttggcgctggcccacttcgtgtggattgccccgctgcaggtggctctgctgatggggctgatctgggagctgctgcaggcctctgccttctgcgggctggggtttctgatcgtgctggccctgttccaagctggcctgggccgcatgatgatgaagtaccgcgatcagagggccggcaagatcagcgagcgcctggtgatcactagcgagatgatagagaacatccagagcgtgaaggcttactgttgggaggaggccatggagaagatgatcgagaacctgaggcagaccgagctgaagctgactagaaaggcagcctacgtgaggtatttcaactccagcgccttcttcttcagcggcttcttcgtggtgttcctgagcgtgctgccctacgccctgatcaagggcatcatcctgaggaagatcttcaccaccattagcttctgcatcgtgctgcgcatggccgtgaccaggcagttcccttgggccgtgcagacttggtacgacagcctgggagccatcaacaagatccaggactttctgcagaagcaggaatataagaccctggagtacaacctgaccaccaccgaggtggtgatggagaacgtgaccgccttctgggaggagggcttcggcgagctgttcgagaaggccaagcagaacaataacaaccgcaagaccagcaacggcgacgactccctcttcttcagcaactttagcctgctgggcacccctgtgctgaaggacatcaacttcaagatcgaaagaggccaactgctggccgtggccggatctaccggcgccggcaagaccagcctgctgatgatgatcatgggcgagctggagcccagcgagggcaagatcaagcacagcggccggatctccttctgctcccagttctcctggatcatgcccggcaccatcaaggagaacatcatcttcggcgtgagctacgacgagtacaggtaccggagcgtgatcaaggcctgccagctggaggaggacatctccaaatttgccgagaaggacaacattgtgctgggcgaaggcgggatcaccctgtccggtggccagcgtgcacgcatctccctggcccgggctgtgtacaaggacgccgacctgtacctgctggacagcccttttggctacctggacgtgctgaccgagaaggagatcttcgagtcctgcgtgtgtaagctgatggccaacaagaccagaatcctggtgaccagcaagatggagcatctgaagaaggccgacaagatcctgatcctgcacgaggggtccagctacttctacggcaccttcagcgagctgcagaacctgcagcccgacttcagctccaagctgatgggctgcgatagcttcgaccagttctccgccgagagaaggaactccattctgaccgagaccctgcaccgattctccctggagggagacgccccagtgagctggaccgagaccaagaagcagagcttcaagcagaccggcgagttcggagagaagcgcaagaactccatcctcaaccccatcaacagcatccggaagttcagcatcgtgcagaagacccctctgcagatgaacgggatcgaggaggacagcgacgagcccctggaacggcgactgtccctcgtgcccgacagcgagcagggcgaggccatcctgccccggatctccgtgatctccactgggcccaccctgcaagcccgacggcggcaaagcgtgctgaacctgatgacccacagcgtgaaccagggccagaatatccaccgcaagactacagccagcacccgcaaggtgagcctggctccccaggccaacctgaccgagctggacatctacagcaggaggctgagccaggagacaggcctggagatcagcgaggagatcaacgaggaggacctgaaggagtgcttcttcgacgacatggagtccatccccgccgtgaccacctggaacacctacctgagatacatcaccgtgcacaagagcctgatcttcgtgctgatctggtgcctggtgatcttcttggccgaggtagccgcctcactggtggtgctgtggctgctgggcaataccccactgcaggacaaggggaactccacccacagccggaacaacagctacgccgtgatcatcacctccaccagcagctactacgtgttctacatctacgtgggcgtggccgacacactgctggccatgggcttcttcagaggcctccctctggtgcacacactgatcaccgtgagcaagatcctgcaccacaagatgctgcacagcgtgctgcaggctcccatgtcaaccctgaacaccctgaaggccggcggcatcctgaacaggttcagcaaggacatcgccattctggacgatctgctgcccctgaccatcttcgacttcatccagctgctgctgatcgtgatcggggccatcgccgtggtggccgtgctgcagccctacatcttcgtggccacagtgcccgtgatcgtggccttcatcatgctgcgcgcctacttcctgcagacctcccagcagctgaagcagctggagagcgaaggccgcagccccatcttcacccacctggtgactagcctgaaggggctgtggaccctgcgcgccttcggcaggcagccctacttcgagaccctgttccacaaggctctgaacctgcacaccgccaactggttcctgtacctcagcaccctgcgctggttccagatgcggatcgagatgatcttcgtgatcttcttcatcgccgtgaccttcatctccatcctgaccaccggggaaggcgagggacgggtgggaatcatcctgaccctggccatgaatatcatgagcaccctgcagtgggccgtgaacagcagcatcgacgtggacagcctgatgcggtccgtgtcccgggtgttcaagttcatcgacatgcccaccgagggcaagcccaccaagagcaccaagccctacaagaacggccagctgagcaaggtgatgattatcgagaacagccacgtgaagaaggacgacatctggccttccggcggccagatgaccgtgaaggacctgaccgccaagtacaccgagggcggcaacgccatcctggagaacatcagcttctccattagccctggacagcgggtgggcctgttgggacggaccggcagtgggaagagcaccctgctgtccgccttcctgcggctgctgaacacggagggcgagatccagatcgacggggtgagctgggacagcatcaccctgcagcagtggcgaaaggccttcggcgtgatcccacagaaggtgtttattttctctggcacctttaggaagaacctggacccctacgagcagtggtccgaccaggagatctggaaggtggccgacgaggtgggcctgcggtcagtgatcgagcagttccccggcaagctggacttcgtgctggtggacggcggctgcgtgctgagccacggccacaagcagctgatgtgcctggcacgcagcgtgctgagcaaggccaagatcctgctgctggacgagccctccgcgcacctggatcccgtgacctaccagatcatcaggcggaccctgaagcaggccttcgccgactgcaccgtgatcctgtgcgagagcagaatcgaggctatgctggagtgccagcagttcctggtgatcgaggagaacaaggtgcggcagtacgactccatccagaagctgctgaacgagcgcagcctgttcagacaggctatctctcccagcgatcgcgtgaagctgttccctcacaggaacagcagcaagtgcaagtctaagccacagatcgccgccctgaaggaggagaccgaggaggaggtgcaggatacccgcctgtaaagctccccgggggcctccaccgcgttatccgttcctcgtaggctggtcctggggaacgggtcggcgggtacccccgtggtctttgaataaagtctgagtgggcggcaaaaaaaaaaaaaaaaaaaaaaaaaaaaaaaaaaaaaaaaaaaaaaaaaaaaaaaaaaaaaaaaaaaaaaaaaaaaaaaaaaaaaaaaaaaaaaaaaaaa

SEQ ID NO: 21 - RNA, 4727 nt, synthetic construct
  source 1..4727: mol_type = other RNA
  modified_base 1: mod_base = OTHER; note = 7-Methylguanosine with triphosphate linkage
  modified_base 2: mod_base = OTHER; note = 2'-O-methyl modified nucleotide
  modified_base 9: mod_base = OTHER; note = N1-methylpseudouracil
  modified_base 17: mod_base = OTHER; note = N1-methylpseudouracil
  modified_base 18: mod_base = OTHER; note = N1-methylpseudouracil
  modified_base 19: mod_base = OTHER; note = N1-methylpseudouracil
  modified_base 22: mod_base = OTHER; note = N1-methylpseudouracil
  modified_base 24: mod_base = OTHER; note = N1-methylpseudouracil
  modified_base 25: mod_base = OTHER; note = N1-methylpseudouracil
  modified_base 30: mod_base = OTHER; note = N1-methylpseudouracil
  modified_base 31: mod_base = OTHER; note = N1-methylpseudouracil
  modified_base 35: mod_base = OTHER; note = N1-methylpseudouracil
  modified_base 36: mod_base = OTHER; note = N1-methylpseudouracil
  modified_base 37: mod_base = OTHER; note = N1-methylpseudouracil
  modified_base 39: mod_base = OTHER; note = N1-methylpseudouracil
  modified_base 40: mod_base = OTHER; note = N1-methylpseudouracil
  modified_base 41: mod_base = OTHER; note = N1-methylpseudouracil
  modified_base 42: mod_base = OTHER; note = N1-methylpseudouracil
  modified_base 45: mod_base = OTHER; note = N1-methylpseudouracil
  modified_base 46: mod_base = OTHER; note = N1-methylpseudouracil
  modified_base 47: mod_base = OTHER; note = N1-methylpseudouracil
  modified_base 48: mod_base = OTHER; note = N1-methylpseudouracil
  modified_base 50: mod_base = OTHER; note = N1-methylpseudouracil
  modified_base 57: mod_base = OTHER; note = N1-methylpseudouracil
  modified_base 65: mod_base = OTHER; note = N1-methylpseudouracil
  modified_base 66: mod_base = OTHER; note = N1-methylpseudouracil
  modified_base 67: mod_base = OTHER; note = N1-methylpseudouracil
  modified_base 68: mod_base = OTHER; note = N1-methylpseudouracil
  modified_base 69: mod_base = OTHER; note = N1-methylpseudouracil
  modified_base 71: mod_base = OTHER; note = N1-methylpseudouracil
  modified_base 72: mod_base = OTHER; note = N1-methylpseudouracil
  modified_base 74: mod_base = OTHER; note = N1-methylpseudouracil
  modified_base 80: mod_base = OTHER; note = N1-methylpseudouracil
  modified_base 93: mod_base = OTHER; note = N1-methylpseudouracil
  modified_base 95: mod_base = OTHER; note = N1-methylpseudouracil
  modified_base 110: mod_base = OTHER; note = N1-methylpseudouracil
  modified_base 113: mod_base = OTHER; note = N1-methylpseudouracil
  modified_base 122: mod_base = OTHER; note = N1-methylpseudouracil
  modified_base 124: mod_base = OTHER; note = N1-methylpseudouracil
  modified_base 125: mod_base = OTHER; note = N1-methylpseudouracil
  modified_base 127: mod_base = OTHER; note = N1-methylpseudouracil
  modified_base 128: mod_base = OTHER; note = N1-methylpseudouracil
  modified_base 133: mod_base = OTHER; note = N1-methylpseudouracil
  modified_base 146: mod_base = OTHER; note = N1-methylpseudouracil
  modified_base 149: mod_base = OTHER; note = N1-methylpseudouracil
  modified_base 160: mod_base = OTHER; note = N1-methylpseudouracil
  modified_base 173: mod_base = OTHER; note = N1-methylpseudouracil
  modified_base 179: mod_base = OTHER; note = N1-methylpseudouracil
  modified_base 181: mod_base = OTHER; note = N1-methylpseudouracil
  modified_base 188: mod_base = OTHER; note = N1-methylpseudouracil
  modified_base 190: mod_base = OTHER; note = N1-methylpseudouracil
  modified_base 197: mod_base = OTHER; note = N1-methylpseudouracil
  modified_base 198: mod_base = OTHER; note = N1-methylpseudouracil
  modified_base 202: mod_base = OTHER; note = N1-methylpseudouracil
  modified_base 206: mod_base = OTHER; note = N1-methylpseudouracil
  modified_base 222: mod_base = OTHER; note = N1-methylpseudouracil
  modified_base 224: mod_base = OTHER; note = N1-methylpseudouracil
  modified_base 236: mod_base = OTHER; note = N1-methylpseudouracil
  modified_base 247: mod_base = OTHER; note = N1-methylpseudouracil
  modified_base 260: mod_base = OTHER; note = N1-methylpseudouracil
  modified_base 279: mod_base = OTHER; note = N1-methylpseudouracil
  modified_base 284: mod_base = OTHER; note = N1-methylpseudouracil
  modified_base 287: mod_base = OTHER; note = N1-methylpseudouracil
  modified_base 296: mod_base = OTHER; note = N1-methylpseudouracil
  modified_base 304: mod_base = OTHER; note = N1-methylpseudouracil
  modified_base 307: mod_base = OTHER; note = N1-methylpseudouracil
  modified_base 308: mod_base = OTHER; note = N1-methylpseudouracil
  modified_base 310: mod_base = OTHER; note = N1-methylpseudouracil
  modified_base 311: mod_base = OTHER; note = N1-methylpseudouracil
  modified_base 313: mod_base = OTHER; note = N1-methylpseudouracil
  modified_base 319: mod_base = OTHER; note = N1-methylpseudouracil
  modified_base 320: mod_base = OTHER; note = N1-methylpseudouracil
  modified_base 323: mod_base = OTHER; note = N1-methylpseudouracil
  modified_base 325: mod_base = OTHER; note = N1-methylpseudouracil
  modified_base 326: mod_base = OTHER; note = N1-methylpseudouracil
  modified_base 328: mod_base = OTHER; note = N1-methylpseudouracil
  modified_base 335: mod_base = OTHER; note = N1-methylpseudouracil
  modified_base 337: mod_base = OTHER; note = N1-methylpseudouracil
  modified_base 338: mod_base = OTHER; note = N1-methylpseudouracil
  modified_base 341: mod_base = OTHER; note = N1-methylpseudouracil
  modified_base 343: mod_base = OTHER; note = N1-methylpseudouracil
  modified_base 347: mod_base = OTHER; note = N1-methylpseudouracil
  modified_base 356: mod_base = OTHER; note = N1-methylpseudouracil
  modified_base 368: mod_base = OTHER; note = N1-methylpseudouracil
  modified_base 375: mod_base = OTHER; note = N1-methylpseudouracil
  modified_base 377: mod_base = OTHER; note = N1-methylpseudouracil
  modified_base 380: mod_base = OTHER; note = N1-methylpseudouracil
  modified_base 383: mod_base = OTHER; note = N1-methylpseudouracil
  modified_base 392: mod_base = OTHER; note = N1-methylpseudouracil
  modified_base 395: mod_base = OTHER; note = N1-methylpseudouracil
  modified_base 403: mod_base = OTHER; note = N1-methylpseudouracil
  modified_base 408: mod_base = OTHER; note = N1-methylpseudouracil
  modified_base 430: mod_base = OTHER; note = N1-methylpseudouracil
  modified_base 434: mod_base = OTHER; note = N1-methylpseudouracil
  modified_base 440: mod_base = OTHER; note = N1-methylpseudouracil
  modified_base 442: mod_base = OTHER; note = N1-methylpseudouracil
  modified_base 446: mod_base = OTHER; note = N1-methylpseudouracil
  modified_base 452: mod_base = OTHER; note = N1-methylpseudouracil
  modified_base 458: mod_base = OTHER; note = N1-methylpseudouracil
  modified_base 460: mod_base = OTHER; note = N1-methylpseudouracil
  modified_base 462: mod_base = OTHER; note = N1-methylpseudouracil
  modified_base 464: mod_base = OTHER; note = N1-methylpseudouracil
  modified_base 467: mod_base = OTHER; note = N1-methylpseudouracil
  modified_base 469: mod_base = OTHER; note = N1-methylpseudouracil
  modified_base 470: mod_base = OTHER; note = N1-methylpseudouracil
  modified_base 473: mod_base = OTHER; note = N1-methylpseudouracil
  modified_base 476: mod_base = OTHER; note = N1-methylpseudouracil
  modified_base 485: mod_base = OTHER; note = N1-methylpseudouracil
  modified_base 488: mod_base = OTHER; note = N1-methylpseudouracil
  modified_base 491: mod_base = OTHER; note = N1-methylpseudouracil
  modified_base 503: mod_base = OTHER; note = N1-methylpseudouracil
  modified_base 505: mod_base = OTHER; note = N1-methylpseudouracil
  modified_base 506: mod_base = OTHER; note = N1-methylpseudouracil
  modified_base 512: mod_base = OTHER; note = N1-methylpseudouracil
  modified_base 516: mod_base = OTHER; note = N1-methylpseudouracil
  modified_base 521: mod_base = OTHER; note = N1-methylpseudouracil
  modified_base 527: mod_base = OTHER; note = N1-methylpseudouracil
  modified_base 533: mod_base = OTHER; note = N1-methylpseudouracil
  modified_base 539: mod_base = OTHER; note = N1-methylpseudouracil
  modified_base 545: mod_base = OTHER; note = N1-methylpseudouracil
  modified_base 547: mod_base = OTHER; note = N1-methylpseudouracil
  modified_base 548: mod_base = OTHER; note = N1-methylpseudouracil
  modified_base 550: mod_base = OTHER; note = N1-methylpseudouracil
  modified_base 554: mod_base = OTHER; note = N1-methylpseudouracil
  modified_base 557: mod_base = OTHER; note = N1-methylpseudouracil
  modified_base 559: mod_base = OTHER; note = N1-methylpseudouracil
  modified_base 572: mod_base = OTHER; note = N1-methylpseudouracil
  modified_base 578: mod_base = OTHER; note = N1-methylpseudouracil
  modified_base 580: mod_base = OTHER; note = N1-methylpseudouracil
  modified_base 590: mod_base = OTHER; note = N1-methylpseudouracil
  modified_base 593: mod_base = OTHER; note = N1-methylpseudouracil
  modified_base 597: mod_base = OTHER; note = N1-methylpseudouracil
  modified_base 602: mod_base = OTHER; note = N1-methylpseudouracil
  modified_base 608: mod_base = OTHER; note = N1-methylpseudouracil
  modified_base 617: mod_base = OTHER; note = N1-methylpseudouracil
  modified_base 620: mod_base = OTHER; note = N1-methylpseudouracil
  modified_base 626: mod_base = OTHER; note = N1-methylpseudouracil
  modified_base 629: mod_base = OTHER; note = N1-methylpseudouracil
  modified_base 641: mod_base = OTHER; note = N1-methylpseudouracil
  modified_base 649: mod_base = OTHER; note = N1-methylpseudouracil
  modified_base 650: mod_base = OTHER; note = N1-methylpseudouracil
  modified_base 661: mod_base = OTHER; note = N1-methylpseudouracil
  modified_base 662: mod_base = OTHER; note = N1-methylpseudouracil
  modified_base 668: mod_base = OTHER; note = N1-methylpseudouracil
  modified_base 676: mod_base = OTHER; note = N1-methylpseudouracil
  modified_base 677: mod_base = OTHER; note = N1-methylpseudouracil
  modified_base 680: mod_base = OTHER; note = N1-methylpseudouracil
  modified_base 682: mod_base = OTHER; note = N1-methylpseudouracil
  modified_base 686: mod_base = OTHER; note = N1-methylpseudouracil
  modified_base 687: mod_base = OTHER; note = N1-methylpseudouracil
  modified_base 695: mod_base = OTHER; note = N1-methylpseudouracil
  modified_base 701: mod_base = OTHER; note = N1-methylpseudouracil
  modified_base 705: mod_base = OTHER; note = N1-methylpseudouracil
  modified_base 707: mod_base = OTHER; note = N1-methylpseudouracil
  modified_base 710: mod_base = OTHER; note = N1-methylpseudouracil
  modified_base 713: mod_base = OTHER; note = N1-methylpseudouracil
  modified_base 719: mod_base = OTHER; note = N1-methylpseudouracil
  modified_base 722: mod_base = OTHER; note = N1-methylpseudouracil
  modified_base 724: mod_base = OTHER; note = N1-methylpseudouracil
  modified_base 731: mod_base = OTHER; note = N1-methylpseudouracil
  modified_base 734: mod_base = OTHER; note = N1-methylpseudouracil
  modified_base 742: mod_base = OTHER; note = N1-methylpseudouracil
  modified_base 744: mod_base = OTHER; note = N1-methylpseudouracil
  modified_base 748: mod_base = OTHER; note = N1-methylpseudouracil
  modified_base 749: mod_base = OTHER; note = N1-methylpseudouracil
  modified_base 751: mod_base = OTHER; note = N1-methylpseudouracil
  modified_base 758: mod_base = OTHER; note = N1-methylpseudouracil
  modified_base 763: mod_base = OTHER; note = N1-methylpseudouracil
  modified_base 764: mod_base = OTHER; note = N1-methylpseudouracil
  modified_base 765: mod_base = OTHER; note = N1-methylpseudouracil
  modified_base 767: mod_base = OTHER; note = N1-methylpseudouracil
  modified_base 770: mod_base = OTHER; note = N1-methylpseudouracil
  modified_base 773: mod_base = OTHER; note = N1-methylpseudouracil
  modified_base 776: mod_base = OTHER; note = N1-methylpseudouracil
  modified_base 782: mod_base = OTHER; note = N1-methylpseudouracil
  modified_base 784: mod_base = OTHER; note = N1-methylpseudouracil
  modified_base 785: mod_base = OTHER; note = N1-methylpseudouracil
  modified_base 792: mod_base = OTHER; note = N1-methylpseudouracil
  modified_base 797: mod_base = OTHER; note = N1-methylpseudouracil
  modified_base 806: mod_base = OTHER; note = N1-methylpseudouracil
  modified_base 809: mod_base = OTHER; note = N1-methylpseudouracil
  modified_base 812: mod_base = OTHER; note = N1-methylpseudouracil
  modified_base 817: mod_base = OTHER; note = N1-methylpseudouracil
  modified_base 825: mod_base = OTHER; note = N1-methylpseudouracil
  modified_base 842: mod_base = OTHER; note = N1-methylpseudouracil
  modified_base 854: mod_base = OTHER; note = N1-methylpseudouracil
  modified_base 857: mod_base = OTHER; note = N1-methylpseudouracil
  modified_base 860: mod_base = OTHER; note = N1-methylpseudouracil
  modified_base 864: mod_base = OTHER; note = N1-methylpseudouracil
  modified_base 872: mod_base = OTHER; note = N1-methylpseudouracil
  modified_base 875: mod_base = OTHER; note = N1-methylpseudouracil
  modified_base 884: mod_base = OTHER; note = N1-methylpseudouracil
  modified_base 893: mod_base = OTHER; note = N1-methylpseudouracil
  modified_base 900: mod_base = OTHER; note = N1-methylpseudouracil
  modified_base 901: mod_base = OTHER; note = N1-methylpseudouracil
  modified_base 904: mod_base = OTHER; note = N1-methylpseudouracil
  modified_base 906: mod_base = OTHER; note = N1-methylpseudouracil
  modified_base 907: mod_base = OTHER; note = N1-methylpseudouracil
  modified_base 920: mod_base = OTHER; note = N1-methylpseudouracil
  modified_base 929: mod_base = OTHER; note = N1-methylpseudouracil
  modified_base 932: mod_base = OTHER; note = N1-methylpseudouracil
  modified_base 941: mod_base = OTHER; note = N1-methylpseudouracil
  modified_base 956: mod_base = OTHER; note = N1-methylpseudouracil
  modified_base 962: mod_base = OTHER; note = N1-methylpseudouracil
  modified_base 966: mod_base = OTHER; note = N1-methylpseudouracil
  modified_base 979: mod_base = OTHER; note = N1-methylpseudouracil
  modified_base 983: mod_base = OTHER; note = N1-methylpseudouracil
  modified_base 988: mod_base = OTHER; note = N1-methylpseudouracil
  modified_base 990: mod_base = OTHER; note = N1-methylpseudouracil
  modified_base 991: mod_base = OTHER; note = N1-methylpseudouracil
  modified_base 992: mod_base = OTHER; note = N1-methylpseudouracil
  modified_base 997: mod_base = OTHER; note = N1-methylpseudouracil
  modified_base 1006: mod_base = OTHER; note = N1-methylpseudouracil
  modified_base 1007: mod_base = OTHER; note = N1-methylpseudouracil
  modified_base 1009: mod_base = OTHER; note = N1-methylpseudouracil
  modified_base 1010: mod_base = OTHER; note = N1-methylpseudouracil
  modified_base 1012: mod_base = OTHER; note = N1-methylpseudouracil
  modified_base 1013: mod_base = OTHER; note = N1-methylpseudouracil
  modified_base 1021: mod_base = OTHER; note = N1-methylpseudouracil
  modified_base 1022: mod_base = OTHER; note = N1-methylpseudouracil
  modified_base 1024: mod_base = OTHER; note = N1-methylpseudouracil
  modified_base 1025: mod_base = OTHER; note = N1-methylpseudouracil
  modified_base 1028: mod_base = OTHER; note = N1-methylpseudouracil
  modified_base 1031: mod_base = OTHER; note = N1-methylpseudouracil
  modified_base 1033: mod_base = OTHER; note = N1-methylpseudouracil
  modified_base 1034: mod_base = OTHER; note = N1-methylpseudouracil
  modified_base 1037: mod_base = OTHER; note = N1-methylpseudouracil
  modified_base 1043: mod_base = OTHER; note = N1-methylpseudouracil
  modified_base 1046: mod_base = OTHER; note = N1-methylpseudouracil
  modified_base 1051: mod_base = OTHER; note = N1-methylpseudouracil
  modified_base 1058: mod_base = OTHER; note = N1-methylpseudouracil
  modified_base 1061: mod_base = OTHER; note = N1-methylpseudouracil
  modified_base 1070: mod_base = OTHER; note = N1-methylpseudouracil
  modified_base 1073: mod_base = OTHER; note = N1-methylpseudouracil
  modified_base 1076: mod_base = OTHER; note = N1-methylpseudouracil
  modified_base 1085: mod_base = OTHER; note = N1-methylpseudouracil
  modified_base 1087: mod_base = OTHER; note = N1-methylpseudouracil
  modified_base 1088: mod_base = OTHER; note = N1-methylpseudouracil
  modified_base 1097: mod_base = OTHER; note = N1-methylpseudouracil
  modified_base 1098: mod_base = OTHER; note = N1-methylpseudouracil
  modified_base 1102: mod_base = OTHER; note = N1-methylpseudouracil
  modified_base 1103: mod_base = OTHER; note = N1-methylpseudouracil
  modified_base 1105: mod_base = OTHER; note = N1-methylpseudouracil
  modified_base 1109: mod_base = OTHER; note = N1-methylpseudouracil
  modified_base 1112: mod_base = OTHER; note = N1-methylpseudouracil
  modified_base 1115: mod_base = OTHER; note = N1-methylpseudouracil
  modified_base 1121: mod_base = OTHER; note = N1-methylpseudouracil
  modified_base 1127: mod_base = OTHER; note = N1-methylpseudouracil
  modified_base 1138: mod_base = OTHER; note = N1-methylpseudouracil
  modified_base 1139: mod_base = OTHER; note = N1-methylpseudouracil
  modified_base 1143: mod_base = OTHER; note = N1-methylpseudouracil
  modified_base 1144: mod_base = OTHER; note = N1-methylpseudouracil
  modified_base 1151: mod_base = OTHER; note = N1-methylpseudouracil
  modified_base 1158: mod_base = OTHER; note = N1-methylpseudouracil
  modified_base 1159: mod_base = OTHER; note = N1-methylpseudouracil
  modified_base 1162: mod_base = OTHER; note = N1-methylpseudouracil
  modified_base 1172: mod_base = OTHER; note = N1-methylpseudouracil
  modified_base 1181: mod_base = OTHER; note = N1-methylpseudouracil
  modified_base 1190: mod_base = OTHER; note = N1-methylpseudouracil
  modified_base 1198: mod_base = OTHER; note = N1-methylpseudouracil
  modified_base 1199: mod_base = OTHER; note = N1-methylpseudouracil
  modified_base 1200: mod_base = OTHER; note = N1-methylpseudouracil
  modified_base 1202: mod_base = OTHER; note = N1-methylpseudouracil
  modified_base 1216: mod_base = OTHER; note = N1-methylpseudouracil
  modified_base 1218: mod_base = OTHER; note = N1-methylpseudouracil
  modified_base 1226: mod_base = OTHER; note = N1-methylpseudouracil
  modified_base 1231: mod_base = OTHER; note = N1-methylpseudouracil
  modified_base 1238: mod_base = OTHER; note = N1-methylpseudouracil
  modified_base 1253: mod_base = OTHER; note = N1-methylpseudouracil
  modified_base 1256: mod_base = OTHER; note = N1-methylpseudouracil
  modified_base 1259: mod_base = OTHER; note = N1-methylpseudouracil
  modified_base 1268: mod_base = OTHER; note = N1-methylpseudouracil
  modified_base 1276: mod_base = OTHER; note = N1-methylpseudouracil
  modified_base 1277: mod_base = OTHER; note = N1-methylpseudouracil
  modified_base 1279: mod_base = OTHER; note = N1-methylpseudouracil
  modified_base 1291: mod_base = OTHER; note = N1-methylpseudouracil
  modified_base 1292: mod_base = OTHER; note = N1-methylpseudouracil
  modified_base 1301: mod_base = OTHER; note = N1-methylpseudouracil
  modified_base 1303: mod_base = OTHER; note = N1-methylpseudouracil
  modified_base 1304: mod_base = OTHER; note = N1-methylpseudouracil
  modified_base 1326: mod_base = OTHER; note = N1-methylpseudouracil
  modified_base 1357: mod_base = OTHER; note = N1-methylpseudouracil
  modified_base 1361: mod_base = OTHER; note = N1-methylpseudouracil
  modified_base 1363: mod_base = OTHER; note = N1-methylpseudouracil
  modified_base 1364: mod_base = OTHER; note = N1-methylpseudouracil
  modified_base 1366: mod_base = OTHER; note = N1-methylpseudouracil
  modified_base 1367: mod_base = OTHER; note = N1-methylpseudouracil
  modified_base 1375: mod_base = OTHER; note = N1-methylpseudouracil
  modified_base 1376: mod_base = OTHER; note = N1-methylpseudouracil
  modified_base 1377: mod_base = OTHER; note = N1-methylpseudouracil
  modified_base 1382: mod_base = OTHER; note = N1-methylpseudouracil
  modified_base 1385: mod_base = OTHER; note = N1-methylpseudouracil
  modified_base 1395: mod_base = OTHER; note = N1-methylpseudouracil
  modified_base 1397: mod_base = OTHER; note = N1-methylpseudouracil
  modified_base 1400: mod_base = OTHER; note = N1-methylpseudouracil
  modified_base 1409: mod_base = OTHER; note = N1-methylpseudouracil
  modified_base 1414: mod_base = OTHER; note = N1-methylpseudouracil
  modified_base 1415: mod_base = OTHER; note = N1-methylpseudouracil
  modified_base 1421: mod_base = OTHER; note = N1-methylpseudouracil
  modified_base 1436: mod_base = OTHER; note = N1-methylpseudouracil
  modified_base 1439: mod_base = OTHER; note = N1-methylpseudouracil
  modified_base 1445: mod_base = OTHER; note = N1-methylpseudouracil
  modified_base 1453: mod_base = OTHER; note = N1-methylpseudouracil
  modified_base 1455: mod_base = OTHER; note = N1-methylpseudouracil
  modified_base 1478: mod_base = OTHER; note = N1-methylpseudouracil
  modified_base 1481: mod_base = OTHER; note = N1-methylpseudouracil
  modified_base 1484: mod_base = OTHER; note = N1-methylpseudouracil
  modified_base 1487: mod_base = OTHER; note = N1-methylpseudouracil
  modified_base 1490: mod_base = OTHER; note = N1-methylpseudouracil
  modified_base 1493: mod_base = OTHER; note = N1-methylpseudouracil
  modified_base 1502: mod_base = OTHER; note = N1-methylpseudouracil
  modified_base 1523: mod_base = OTHER; note = N1-methylpseudouracil
  modified_base 1541: mod_base = OTHER; note = N1-methylpseudouracil
  modified_base 1543: mod_base = OTHER; note = N1-methylpseudouracil
  modified_base 1546: mod_base = OTHER; note = N1-methylpseudouracil
  modified_base 1547: mod_base = OTHER; note = N1-methylpseudouracil
  modified_base 1549: mod_base = OTHER; note = N1-methylpseudouracil
  modified_base 1552: mod_base = OTHER; note = N1-methylpseudouracil
  modified_base 1558: mod_base = OTHER; note = N1-methylpseudouracil
  modified_base 1559: mod_base = OTHER; note = N1-methylpseudouracil
  modified_base 1561: mod_base = OTHER; note = N1-methylpseudouracil
  modified_base 1564: mod_base = OTHER; note = N1-methylpseudouracil
  modified_base 1568: mod_base = OTHER; note = N1-methylpseudouracil
  modified_base 1571: mod_base = OTHER; note = N1-methylpseudouracil
  modified_base 1583: mod_base = OTHER; note = N1-methylpseudouracil
  modified_base 1595: mod_base = OTHER; note = N1-methylpseudouracil
  modified_base 1598: mod_base = OTHER; note = N1-methylpseudouracil
  modified_base 1600: mod_base = OTHER; note = N1-methylpseudouracil
  modified_base 1601: mod_base = OTHER; note = N1-methylpseudouracil
  modified_base 1607: mod_base = OTHER; note = N1-methylpseudouracil
  modified_base 1612: mod_base = OTHER; note = N1-methylpseudouracil
  modified_base 1621: mod_base = OTHER; note = N1-methylpseudouracil
  modified_base 1627: mod_base = OTHER; note = N1-methylpseudouracil
  modified_base 1637: mod_base = OTHER; note = N1-methylpseudouracil
  modified_base 1640: mod_base = OTHER; note = N1-methylpseudouracil
  modified_base 1648: mod_base = OTHER; note = N1-methylpseudouracil
  modified_base 1655: mod_base = OTHER; note = N1-methylpseudouracil
  modified_base 1667: mod_base = OTHER; note = N1-methylpseudouracil
  modified_base 1669: mod_base = OTHER; note = N1-methylpseudouracil
  modified_base 1675: mod_base = OTHER; note = N1-methylpseudouracil
  modified_base 1676: mod_base = OTHER; note = N1-methylpseudouracil
  modified_base 1677: mod_base = OTHER; note = N1-methylpseudouracil
  modified_base 1694: mod_base = OTHER; note = N1-methylpseudouracil
  modified_base 1695: mod_base = OTHER; note = N1-methylpseudouracil
  modified_base 1697: mod_base = OTHER; note = N1-methylpseudouracil
  modified_base 1700: mod_base = OTHER; note = N1-methylpseudouracil
  modified_base 1715: mod_base = OTHER; note = N1-methylpseudouracil
  modified_base 1721: mod_base = OTHER; note = N1-methylpseudouracil
  modified_base 1723: mod_base = OTHER; note = N1-methylpseudouracil
  modified_base 1728: mod_base = OTHER; note = N1-methylpseudouracil
  modified_base 1737: mod_base = OTHER; note = N1-methylpseudouracil
  modified_base 1745: mod_base = OTHER; note = N1-methylpseudouracil
  modified_base 1747: mod_base = OTHER; note = N1-methylpseudouracil
  modified_base 1751: mod_base = OTHER; note = N1-methylpseudouracil
  modified_base 1761: mod_base = OTHER; note = N1-methylpseudouracil
  modified_base 1763: mod_base = OTHER; note = N1-methylpseudouracil
  modified_base 1765: mod_base = OTHER; note = N1-methylpseudouracil
  modified_base 1781: mod_base = OTHER; note = N1-methylpseudouracil
  modified_base 1783: mod_base = OTHER; note = N1-methylpseudouracil
  modified_base 1787: mod_base = OTHER; note = N1-methylpseudouracil
  modified_base 1790: mod_base = OTHER; note = N1-methylpseudouracil
  modified_base 1800: mod_base = OTHER; note = N1-methylpseudouracil
  modified_base 1801: mod_base = OTHER; note = N1-methylpseudouracil
  modified_base 1802: mod_base = OTHER; note = N1-methylpseudouracil
  modified_base 1803: mod_base = OTHER; note = N1-methylpseudouracil
  modified_base 1807: mod_base = OTHER; note = N1-methylpseudouracil
  modified_base 1811: mod_base = OTHER; note = N1-methylpseudouracil
  modified_base 1817: mod_base = OTHER; note = N1-methylpseudouracil
  modified_base 1820: mod_base = OTHER; note = N1-methylpseudouracil
  modified_base 1835: mod_base = OTHER; note = N1-methylpseudouracil
  modified_base 1837: mod_base = OTHER; note = N1-methylpseudouracil
  modified_base 1838: mod_base = OTHER; note = N1-methylpseudouracil
  modified_base 1843: mod_base = OTHER; note = N1-methylpseudouracil
  modified_base 1846: mod_base = OTHER; note = N1-methylpseudouracil
  modified_base 1850: mod_base = OTHER; note = N1-methylpseudouracil
  modified_base 1852: mod_base = OTHER; note = N1-methylpseudouracil
  modified_base 1854: mod_base = OTHER; note = N1-methylpseudouracil
  modified_base 1859: mod_base = OTHER; note = N1-methylpseudouracil
  modified_base 1862: mod_base = OTHER; note = N1-methylpseudouracil
  modified_base 1880: mod_base = OTHER; note = N1-methylpseudouracil
  modified_base 1883: mod_base = OTHER; note = N1-methylpseudouracil
  modified_base 1886: mod_base = OTHER; note = N1-methylpseudouracil
  modified_base 1898: mod_base = OTHER; note = N1-methylpseudouracil
  modified_base 1905: mod_base = OTHER; note = N1-methylpseudouracil
  modified_base 1907: mod_base = OTHER; note = N1-methylpseudouracil
  modified_base 1925: mod_base = OTHER; note = N1-methylpseudouracil
  modified_base 1928: mod_base = OTHER; note = N1-methylpseudouracil
  modified_base 1931: mod_base = OTHER; note = N1-methylpseudouracil
  modified_base 1934: mod_base = OTHER; note = N1-methylpseudouracil
  modified_base 1945: mod_base = OTHER; note = N1-methylpseudouracil
  modified_base 1951: mod_base = OTHER; note = N1-methylpseudouracil
  modified_base 1954: mod_base = OTHER; note = N1-methylpseudouracil
  modified_base 1955: mod_base = OTHER; note = N1-methylpseudouracil
  modified_base 1957: mod_base = OTHER; note = N1-methylpseudouracil
  modified_base 1966: mod_base = OTHER; note = N1-methylpseudouracil
  modified_base 1967: mod_base = OTHER; note = N1-methylpseudouracil
  modified_base 1976: mod_base = OTHER; note = N1-methylpseudouracil
  modified_base 1985: mod_base = OTHER; note = N1-methylpseudouracil
  modified_base 1996: mod_base = OTHER; note = N1-methylpseudouracil
  modified_base 1997: mod_base = OTHER; note = N1-methylpseudouracil
  modified_base 2002: mod_base = OTHER; note = N1-methylpseudouracil
  modified_base 2009: mod_base = OTHER; note = N1-methylpseudouracil
  modified_base 2012: mod_base = OTHER; note = N1-methylpseudouracil
  modified_base 2017: mod_base = OTHER; note = N1-methylpseudouracil
  modified_base 2022: mod_base = OTHER; note = N1-methylpseudouracil
  modified_base 2026: mod_base = OTHER; note = N1-methylpseudouracil
  modified_base 2027: mod_base = OTHER; note = N1-methylpseudouracil
  modified_base 2035: mod_base = OTHER; note = N1-methylpseudouracil
  modified_base 2036: mod_base = OTHER; note = N1-methylpseudouracil
  modified_base 2038: mod_base = OTHER; note = N1-methylpseudouracil
  modified_base 2056: mod_base = OTHER; note = N1-methylpseudouracil
  modified_base 2060: mod_base = OTHER; note = N1-methylpseudouracil
  modified_base 2061: mod_base = OTHER; note = N1-methylpseudouracil
  modified_base 2063: mod_base = OTHER; note = N1-methylpseudouracil
  modified_base 2075: mod_base = OTHER; note = N1-methylpseudouracil
  modified_base 2083: mod_base = OTHER; note = N1-methylpseudouracil
  modified_base 2084: mod_base = OTHER; note = N1-methylpseudouracil
  modified_base 2086: mod_base = OTHER; note = N1-methylpseudouracil
  modified_base 2090: mod_base = OTHER; note = N1-methylpseudouracil
  modified_base 2108: mod_base = OTHER; note = N1-methylpseudouracil
  modified_base 2113: mod_base = OTHER; note = N1-methylpseudouracil
  modified_base 2137: mod_base = OTHER; note = N1-methylpseudouracil
  modified_base 2138: mod_base = OTHER; note = N1-methylpseudouracil
  modified_base 2155: mod_base = OTHER; note = N1-methylpseudouracil
  modified_base 2156: mod_base = OTHER; note = N1-methylpseudouracil
  modified_base 2176: mod_base = OTHER; note = N1-methylpseudouracil
  modified_base 2180: mod_base = OTHER; note = N1-methylpseudouracil
  modified_base 2183: mod_base = OTHER; note = N1-methylpseudouracil
  modified_base 2192: mod_base = OTHER; note = N1-methylpseudouracil
  modified_base 2201: mod_base = OTHER; note = N1-methylpseudouracil
  modified_base 2209: mod_base = OTHER; note = N1-methylpseudouracil
  modified_base 2210: mod_base = OTHER; note = N1-methylpseudouracil
  modified_base 2216: mod_base = OTHER; note = N1-methylpseudouracil
  modified_base 2219: mod_base = OTHER; note = N1-methylpseudouracil
  modified_base 2232: mod_base = OTHER; note = N1-methylpseudouracil
  modified_base 2234: mod_base = OTHER; note = N1-methylpseudouracil
  modified_base 2240: mod_base = OTHER; note = N1-methylpseudouracil
  modified_base 2249: mod_base = OTHER; note = N1-methylpseudouracil
  modified_base 2273: mod_base = OTHER; note = N1-methylpseudouracil
  modified_base 2285: mod_base = OTHER; note = N1-methylpseudouracil
  modified_base 2287: mod_base = OTHER; note = N1-methylpseudouracil
  modified_base 2291: mod_base = OTHER; note = N1-methylpseudouracil
  modified_base 2294: mod_base = OTHER; note = N1-methylpseudouracil
  modified_base 2321: mod_base = OTHER; note = N1-methylpseudouracil
  modified_base 2324: mod_base = OTHER; note = N1-methylpseudouracil
  modified_base 2333: mod_base = OTHER; note = N1-methylpseudouracil
  modified_base 2335: mod_base = OTHER; note = N1-methylpseudouracil
  modified_base 2339: mod_base = OTHER; note = N1-methylpseudouracil
  modified_base 2342: mod_base = OTHER; note = N1-methylpseudouracil
  modified_base 2344: mod_base = OTHER; note = N1-methylpseudouracil
  modified_base 2349: mod_base = OTHER; note = N1-methylpseudouracil
  modified_base 2360: mod_base = OTHER; note = N1-methylpseudouracil
  modified_base 2384: mod_base = OTHER; note = N1-methylpseudouracil
  modified_base 2387: mod_base = OTHER; note = N1-methylpseudouracil
  modified_base 2393: mod_base = OTHER; note = N1-methylpseudouracil
  modified_base 2396: mod_base = OTHER; note = N1-methylpseudouracil
  modified_base 2408: mod_base = OTHER; note = N1-methylpseudouracil
  modified_base 2424: mod_base = OTHER; note = N1-methylpseudouracil
  modified_base 2426: mod_base = OTHER; note = N1-methylpseudouracil
  modified_base 2439: mod_base = OTHER; note = N1-methylpseudouracil
  modified_base 2459: mod_base = OTHER; note = N1-methylpseudouracil
  modified_base 2465: mod_base = OTHER; note = N1-methylpseudouracil
  modified_base 2469: mod_base = OTHER; note = N1-methylpseudouracil
  modified_base 2483: mod_base = OTHER; note = N1-methylpseudouracil
  modified_base 2492: mod_base = OTHER; note = N1-methylpseudouracil
  modified_base 2498: mod_base = OTHER; note = N1-methylpseudouracil
  modified_base 2500: mod_base = OTHER; note = N1-methylpseudouracil
  modified_base 2513: mod_base = OTHER; note = N1-methylpseudouracil
  modified_base 2531: mod_base = OTHER; note = N1-methylpseudouracil
  modified_base 2537: mod_base = OTHER; note = N1-methylpseudouracil
  modified_base 2549: mod_base = OTHER; note = N1-methylpseudouracil
  modified_base 2564: mod_base = OTHER; note = N1-methylpseudouracil
  modified_base 2572: mod_base = OTHER; note = N1-methylpseudouracil
  modified_base 2575: mod_base = OTHER; note = N1-methylpseudouracil
  modified_base 2576: mod_base = OTHER; note = N1-methylpseudouracil
  modified_base 2578: mod_base = OTHER; note = N1-methylpseudouracil
  modified_base 2579: mod_base = OTHER; note = N1-methylpseudouracil
  modified_base 2588: mod_base = OTHER; note = N1-methylpseudouracil
  modified_base 2593: mod_base = OTHER; note = N1-methylpseudouracil
  modified_base 2597: mod_base = OTHER; note = N1-methylpseudouracil
  modified_base 2606: mod_base = OTHER; note = N1-methylpseudouracil
  modified_base 2614: mod_base = OTHER; note = N1-methylpseudouracil
  modified_base 2623: mod_base = OTHER; note = N1-methylpseudouracil
  modified_base 2627: mod_base = OTHER; note = N1-methylpseudouracil
  modified_base 2632: mod_base = OTHER; note = N1-methylpseudouracil
  modified_base 2636: mod_base = OTHER; note = N1-methylpseudouracil
  modified_base 2642: mod_base = OTHER; note = N1-methylpseudouracil
  modified_base 2654: mod_base = OTHER; note = N1-methylpseudouracil
  modified_base 2657: mod_base = OTHER; note = N1-methylpseudouracil
  modified_base 2659: mod_base = OTHER; note = N1-methylpseudouracil
  modified_base 2660: mod_base = OTHER; note = N1-methylpseudouracil
  modified_base 2663: mod_base = OTHER; note = N1-methylpseudouracil
  modified_base 2666: mod_base = OTHER; note = N1-methylpseudouracil
  modified_base 2669: mod_base = OTHER; note = N1-methylpseudouracil
  modified_base 2671: mod_base = OTHER; note = N1-methylpseudouracil
  modified_base 2674: mod_base = OTHER; note = N1-methylpseudouracil
  modified_base 2678: mod_base = OTHER; note = N1-methylpseudouracil
  modified_base 2681: mod_base = OTHER; note = N1-methylpseudouracil
  modified_base 2684: mod_base = OTHER; note = N1-methylpseudouracil
  modified_base 2686: mod_base = OTHER; note = N1-methylpseudouracil
  modified_base 2687: mod_base = OTHER; note = N1-methylpseudouracil
  modified_base 2689: mod_base = OTHER; note = N1-methylpseudouracil
  modified_base 2690: mod_base = OTHER; note = N1-methylpseudouracil
  modified_base 2699: mod_base = OTHER; note = N1-methylpseudouracil
  modified_base 2707: mod_base = OTHER; note = N1-methylpseudouracil
  modified_base 2711: mod_base = OTHER; note = N1-methylpseudouracil
  modified_base 2714: mod_base = OTHER; note = N1-methylpseudouracil
  modified_base 2717: mod_base = OTHER; note = N1-methylpseudouracil
  modified_base 2720: mod_base = OTHER; note = N1-methylpseudouracil
  modified_base 2722: mod_base = OTHER; note = N1-methylpseudouracil
  modified_base 2726: mod_base = OTHER; note = N1-methylpseudouracil
  modified_base 2729: mod_base = OTHER; note = N1-methylpseudouracil
  modified_base 2736: mod_base = OTHER; note = N1-methylpseudouracil
  modified_base 2744: mod_base = OTHER; note = N1-methylpseudouracil
  modified_base 2761: mod_base = OTHER; note = N1-methylpseudouracil
  modified_base 2785: mod_base = OTHER; note = N1-methylpseudouracil
  modified_base 2792: mod_base = OTHER; note = N1-methylpseudouracil
  modified_base 2795: mod_base = OTHER; note = N1-methylpseudouracil
  modified_base 2798: mod_base = OTHER; note = N1-methylpseudouracil
  modified_base 2803: mod_base = OTHER; note = N1-methylpseudouracil
  modified_base 2815: mod_base = OTHER; note = N1-methylpseudouracil
  modified_base 2818: mod_base = OTHER; note = N1-methylpseudouracil
  modified_base 2822: mod_base = OTHER; note = N1-methylpseudouracil
  modified_base 2824: mod_base = OTHER; note = N1-methylpseudouracil
  modified_base 2825: mod_base = OTHER; note = N1-methylpseudouracil
  modified_base 2827: mod_base = OTHER; note = N1-methylpseudouracil
  modified_base 2831: mod_base = OTHER; note = N1-methylpseudouracil
  modified_base 2833: mod_base = OTHER; note = N1-methylpseudouracil
  modified_base 2837: mod_base = OTHER; note = N1-methylpseudouracil
  modified_base 2843: mod_base = OTHER; note = N1-methylpseudouracil
  modified_base 2855: mod_base = OTHER; note = N1-methylpseudouracil
  modified_base 2858: mod_base = OTHER; note = N1-methylpseudouracil
  modified_base 2864: mod_base = OTHER; note = N1-methylpseudouracil
  modified_base 2869: mod_base = OTHER; note = N1-methylpseudouracil
  modified_base 2870: mod_base = OTHER; note = N1-methylpseudouracil
  modified_base 2872: mod_base = OTHER; note = N1-methylpseudouracil
  modified_base 2873: mod_base = OTHER; note = N1-methylpseudouracil
  modified_base 2882: mod_base = OTHER; note = N1-methylpseudouracil
  modified_base 2886: mod_base = OTHER; note = N1-methylpseudouracil
  modified_base 2888: mod_base = OTHER; note = N1-methylpseudouracil
  modified_base 2891: mod_base = OTHER; note = N1-methylpseudouracil
  modified_base 2900: mod_base = OTHER; note = N1-methylpseudouracil
  modified_base 2903: mod_base = OTHER; note = N1-methylpseudouracil
  modified_base 2909: mod_base = OTHER; note = N1-methylpseudouracil
  modified_base 2918: mod_base = OTHER; note = N1-methylpseudouracil
  modified_base 2921: mod_base = OTHER; note = N1-methylpseudouracil
  modified_base 2933: mod_base = OTHER; note = N1-methylpseudouracil
  modified_base 2936: mod_base = OTHER; note = N1-methylpseudouracil
  modified_base 2945: mod_base = OTHER; note = N1-methylpseudouracil
  modified_base 2948: mod_base = OTHER; note = N1-methylpseudouracil
  modified_base 2955: mod_base = OTHER; note = N1-methylpseudouracil
  modified_base 2960: mod_base = OTHER; note = N1-methylpseudouracil
  modified_base 2962: mod_base = OTHER; note = N1-methylpseudouracil
  modified_base 2969: mod_base = OTHER; note = N1-methylpseudouracil
  modified_base 2978: mod_base = OTHER; note = N1-methylpseudouracil
  modified_base 2993: mod_base = OTHER; note = N1-methylpseudouracil
  modified_base 2996: mod_base = OTHER; note = N1-methylpseudouracil
  modified_base 3004: mod_base = OTHER; note = N1-methylpseudouracil
  modified_base 3005: mod_base = OTHER; note = N1-methylpseudouracil
  modified_base 3017: mod_base = OTHER; note = N1-methylpseudouracil
  modified_base 3023: mod_base = OTHER; note = N1-methylpseudouracil
  modified_base 3024: mod_base = OTHER; note = N1-methylpseudouracil
  modified_base 3026: mod_base = OTHER; note = N1-methylpseudouracil
  modified_base 3033: mod_base = OTHER; note = N1-methylpseudouracil
  modified_base 3035: mod_base = OTHER; note = N1-methylpseudouracil
  modified_base 3038: mod_base = OTHER; note = N1-methylpseudouracil
  modified_base 3044: mod_base = OTHER; note = N1-methylpseudouracil
  modified_base 3050: mod_base = OTHER; note = N1-methylpseudouracil
  modified_base 3052: mod_base = OTHER; note = N1-methylpseudouracil
  modified_base 3053: mod_base = OTHER; note = N1-methylpseudouracil
  modified_base 3058: mod_base = OTHER; note = N1-methylpseudouracil
  modified_base 3059: mod_base = OTHER; note = N1-methylpseudouracil
  modified_base 3062: mod_base = OTHER; note = N1-methylpseudouracil
  modified_base 3068: mod_base = OTHER; note = N1-methylpseudouracil
  modified_base 3071: mod_base = OTHER; note = N1-methylpseudouracil
  modified_base 3074: mod_base = OTHER; note = N1-methylpseudouracil
  modified_base 3077: mod_base = OTHER; note = N1-methylpseudouracil
  modified_base 3080: mod_base = OTHER; note = N1-methylpseudouracil
  modified_base 3083: mod_base = OTHER; note = N1-methylpseudouracil
  modified_base 3092: mod_base = OTHER; note = N1-methylpseudouracil
  modified_base 3098: mod_base = OTHER; note = N1-methylpseudouracil
  modified_base 3101: mod_base = OTHER; note = N1-methylpseudouracil
  modified_base 3107: mod_base = OTHER; note = N1-methylpseudouracil
  modified_base 3110: mod_base = OTHER; note = N1-methylpseudouracil
  modified_base 3118: mod_base = OTHER; note = N1-methylpseudouracil
  modified_base 3122: mod_base = OTHER; note = N1-methylpseudouracil
  modified_base 3124: mod_base = OTHER; note = N1-methylpseudouracil
  modified_base 3125: mod_base = OTHER; note = N1-methylpseudouracil
  modified_base 3128: mod_base = OTHER; note = N1-methylpseudouracil
  modified_base 3137: mod_base = OTHER; note = N1-methylpseudouracil
  modified_base 3143: mod_base = OTHER; note = N1-methylpseudouracil
  modified_base 3146: mod_base = OTHER; note = N1-methylpseudouracil
  modified_base 3149: mod_base = OTHER; note = N1-methylpseudouracil
  modified_base 3154: mod_base = OTHER; note = N1-methylpseudouracil
  modified_base 3155: mod_base = OTHER; note = N1-methylpseudouracil
  modified_base 3158: mod_base = OTHER; note = N1-methylpseudouracil
  modified_base 3161: mod_base = OTHER; note = N1-methylpseudouracil
  modified_base 3164: mod_base = OTHER; note = N1-methylpseudouracil
  modified_base 3172: mod_base = OTHER; note = N1-methylpseudouracil
  modified_base 3175: mod_base = OTHER; note = N1-methylpseudouracil
  modified_base 3176: mod_base = OTHER; note = N1-methylpseudouracil
  modified_base 3179: mod_base = OTHER; note = N1-methylpseudouracil
  modified_base 3187: mod_base = OTHER; note = N1-methylpseudouracil
  modified_base 3197: mod_base = OTHER; note = N1-methylpseudouracil
  modified_base 3206: mod_base = OTHER; note = N1-methylpseudouracil
  modified_base 3230: mod_base = OTHER; note = N1-methylpseudouracil
  modified_base 3232: mod_base = OTHER; note = N1-methylpseudouracil
  modified_base 3233: mod_base = OTHER; note = N1-methylpseudouracil
  modified_base 3242: mod_base = OTHER; note = N1-methylpseudouracil
  modified_base 3245: mod_base = OTHER; note = N1-methylpseudouracil
  modified_base 3249: mod_base = OTHER; note = N1-methylpseudouracil
  modified_base 3254: mod_base = OTHER; note = N1-methylpseudouracil
  modified_base 3263: mod_base = OTHER; note = N1-methylpseudouracil
  modified_base 3265: mod_base = OTHER; note = N1-methylpseudouracil
  modified_base 3272: mod_base = OTHER; note = N1-methylpseudouracil
  modified_base 3280: mod_base = OTHER; note = N1-methylpseudouracil
  modified_base 3281: mod_base = OTHER; note = N1-methylpseudouracil
  modified_base 3295: mod_base = OTHER; note = N1-methylpseudouracil
  modified_base 3298: mod_base = OTHER; note = N1-methylpseudouracil
  modified_base 3299: mod_base = OTHER; note = N1-methylpseudouracil
  modified_base 3308: mod_base = OTHER; note = N1-methylpseudouracil
  modified_base 3310: mod_base = OTHER; note = N1-methylpseudouracil
  modified_base 3311: mod_base = OTHER; note = N1-methylpseudouracil
  modified_base 3321: mod_base = OTHER; note = N1-methylpseudouracil
  modified_base 3323: mod_base = OTHER; note = N1-methylpseudouracil
  modified_base 3329: mod_base = OTHER; note = N1-methylpseudouracil
  modified_base 3343: mod_base = OTHER; note = N1-methylpseudouracil
  modified_base 3346: mod_base = OTHER; note = N1-methylpseudouracil
  modified_base 3347: mod_base = OTHER; note = N1-methylpseudouracil
  modified_base 3350: mod_base = OTHER; note = N1-methylpseudouracil
  modified_base 3352: mod_base = OTHER; note = N1-methylpseudouracil
  modified_base 3356: mod_base = OTHER; note = N1-methylpseudouracil
  modified_base 3365: mod_base = OTHER; note = N1-methylpseudouracil
  modified_base 3370: mod_base = OTHER; note = N1-methylpseudouracil
  modified_base 3373: mod_base = OTHER; note = N1-methylpseudouracil
  modified_base 3374: mod_base = OTHER; note = N1-methylpseudouracil
  modified_base 3380: mod_base = OTHER; note = N1-methylpseudouracil
  modified_base 3386: mod_base = OTHER; note = N1-methylpseudouracil
  modified_base 3392: mod_base = OTHER; note = N1-methylpseudouracil
  modified_base 3395: mod_base = OTHER; note = N1-methylpseudouracil
  modified_base 3397: mod_base = OTHER; note = N1-methylpseudouracil
  modified_base 3398: mod_base = OTHER; note = N1-methylpseudouracil
  modified_base 3401: mod_base = OTHER; note = N1-methylpseudouracil
  modified_base 3404: mod_base = OTHER; note = N1-methylpseudouracil
  modified_base 3406: mod_base = OTHER; note = N1-methylpseudouracil
  modified_base 3407: mod_base = OTHER; note = N1-methylpseudouracil
  modified_base 3409: mod_base = OTHER; note = N1-methylpseudouracil
  modified_base 3410: mod_base = OTHER; note = N1-methylpseudouracil
  modified_base 3413: mod_base = OTHER; note = N1-methylpseudouracil
  modified_base 3419: mod_base = OTHER; note = N1-methylpseudouracil
  modified_base 3424: mod_base = OTHER; note = N1-methylpseudouracil
  modified_base 3425: mod_base = OTHER; note = N1-methylpseudouracil
  modified_base 3428: mod_base = OTHER; note = N1-methylpseudouracil
  modified_base 3430: mod_base = OTHER; note = N1-methylpseudouracil
  modified_base 3434: mod_base = OTHER; note = N1-methylpseudouracil
  modified_base 3437: mod_base = OTHER; note = N1-methylpseudouracil
  modified_base 3464: mod_base = OTHER; note = N1-methylpseudouracil
  modified_base 3470: mod_base = OTHER; note = N1-methylpseudouracil
  modified_base 3473: mod_base = OTHER; note = N1-methylpseudouracil
  modified_base 3476: mod_base = OTHER; note = N1-methylpseudouracil
  modified_base 3482: mod_base = OTHER; note = N1-methylpseudouracil
  modified_base 3488: mod_base = OTHER; note = N1-methylpseudouracil
  modified_base 3492: mod_base = OTHER; note = N1-methylpseudouracil
  modified_base 3494: mod_base = OTHER; note = N1-methylpseudouracil
  modified_base 3497: mod_base = OTHER; note = N1-methylpseudouracil
  modified_base 3506: mod_base = OTHER; note = N1-methylpseudouracil
  modified_base 3511: mod_base = OTHER; note = N1-methylpseudouracil
  modified_base 3518: mod_base = OTHER; note = N1-methylpseudouracil
  modified_base 3530: mod_base = OTHER; note = N1-methylpseudouracil
  modified_base 3536: mod_base = OTHER; note = N1-methylpseudouracil
  modified_base 3545: mod_base = OTHER; note = N1-methylpseudouracil
  modified_base 3548: mod_base = OTHER; note = N1-methylpseudouracil
  modified_base 3553: mod_base = OTHER; note = N1-methylpseudouracil
  modified_base 3557: mod_base = OTHER; note = N1-methylpseudouracil
  modified_base 3559: mod_base = OTHER; note = N1-methylpseudouracil
  modified_base 3566: mod_base = OTHER; note = N1-methylpseudouracil
  modified_base 3568: mod_base = OTHER; note = N1-methylpseudouracil
  modified_base 3569: mod_base = OTHER; note = N1-methylpseudouracil
  modified_base 3574: mod_base = OTHER; note = N1-methylpseudouracil
  modified_base 3575: mod_base = OTHER; note = N1-methylpseudouracil
  modified_base 3578: mod_base = OTHER; note = N1-methylpseudouracil
  modified_base 3584: mod_base = OTHER; note = N1-methylpseudouracil
  modified_base 3622: mod_base = OTHER; note = N1-methylpseudouracil
  modified_base 3638: mod_base = OTHER; note = N1-methylpseudouracil
  modified_base 3647: mod_base = OTHER; note = N1-methylpseudouracil
  modified_base 3650: mod_base = OTHER; note = N1-methylpseudouracil
  modified_base 3653: mod_base = OTHER; note = N1-methylpseudouracil
  modified_base 3654: mod_base = OTHER; note = N1-methylpseudouracil
  modified_base 3656: mod_base = OTHER; note = N1-methylpseudouracil
  modified_base 3671: mod_base = OTHER; note = N1-methylpseudouracil
  modified_base 3686: mod_base = OTHER; note = N1-methylpseudouracil
  modified_base 3688: mod_base = OTHER; note = N1-methylpseudouracil
  modified_base 3693: mod_base = OTHER; note = N1-methylpseudouracil
  modified_base 3694: mod_base = OTHER; note = N1-methylpseudouracil
  modified_base 3707: mod_base = OTHER; note = N1-methylpseudouracil
  modified_base 3713: mod_base = OTHER; note = N1-methylpseudouracil
  modified_base 3722: mod_base = OTHER; note = N1-methylpseudouracil
  modified_base 3733: mod_base = OTHER; note = N1-methylpseudouracil
  modified_base 3755: mod_base = OTHER; note = N1-methylpseudouracil
  modified_base 3758: mod_base = OTHER; note = N1-methylpseudouracil
  modified_base 3767: mod_base = OTHER; note = N1-methylpseudouracil
  modified_base 3772: mod_base = OTHER; note = N1-methylpseudouracil
  modified_base 3773: mod_base = OTHER; note = N1-methylpseudouracil
  modified_base 3775: mod_base = OTHER; note = N1-methylpseudouracil
  modified_base 3779: mod_base = OTHER; note = N1-methylpseudouracil
  modified_base 3780: mod_base = OTHER; note = N1-methylpseudouracil
  modified_base 3786: mod_base = OTHER; note = N1-methylpseudouracil
  modified_base 3797: mod_base = OTHER; note = N1-methylpseudouracil
  modified_base 3803: mod_base = OTHER; note = N1-methylpseudouracil
  modified_base 3805: mod_base = OTHER; note = N1-methylpseudouracil
  modified_base 3806: mod_base = OTHER; note = N1-methylpseudouracil
  modified_base 3822: mod_base = OTHER; note = N1-methylpseudouracil
  modified_base 3836: mod_base = OTHER; note = N1-methylpseudouracil
  modified_base 3839: mod_base = OTHER; note = N1-methylpseudouracil
  modified_base 3841: mod_base = OTHER; note = N1-methylpseudouracil
  modified_base 3847: mod_base = OTHER; note = N1-methylpseudouracil
  modified_base 3848: mod_base = OTHER; note = N1-methylpseudouracil
  modified_base 3851: mod_base = OTHER; note = N1-methylpseudouracil
  modified_base 3857: mod_base = OTHER; note = N1-methylpseudouracil
  modified_base 3860: mod_base = OTHER; note = N1-methylpseudouracil
  modified_base 3878: mod_base = OTHER; note = N1-methylpseudouracil
  modified_base 3884: mod_base = OTHER; note = N1-methylpseudouracil
  modified_base 3893: mod_base = OTHER; note = N1-methylpseudouracil
  modified_base 3898: mod_base = OTHER; note = N1-methylpseudouracil
  modified_base 3908: mod_base = OTHER; note = N1-methylpseudouracil
  modified_base 3914: mod_base = OTHER; note = N1-methylpseudouracil
  modified_base 3922: mod_base = OTHER; note = N1-methylpseudouracil
  modified_base 3934: mod_base = OTHER; note = N1-methylpseudouracil
  modified_base 3935: mod_base = OTHER; note = N1-methylpseudouracil
  modified_base 3941: mod_base = OTHER; note = N1-methylpseudouracil
  modified_base 3944: mod_base = OTHER; note = N1-methylpseudouracil
  modified_base 3956: mod_base = OTHER; note = N1-methylpseudouracil
  modified_base 3958: mod_base = OTHER; note = N1-methylpseudouracil
  modified_base 3959: mod_base = OTHER; note = N1-methylpseudouracil
  modified_base 3960: mod_base = OTHER; note = N1-methylpseudouracil
  modified_base 3962: mod_base = OTHER; note = N1-methylpseudouracil
  modified_base 3963: mod_base = OTHER; note = N1-methylpseudouracil
  modified_base 3964: mod_base = OTHER; note = N1-methylpseudouracil
  modified_base 3965: mod_base = OTHER; note = N1-methylpseudouracil
  modified_base 3967: mod_base = OTHER; note = N1-methylpseudouracil
  modified_base 3969: mod_base = OTHER; note = N1-methylpseudouracil
  modified_base 3976: mod_base = OTHER; note = N1-methylpseudouracil
  modified_base 3977: mod_base = OTHER; note = N1-methylpseudouracil
  modified_base 3978: mod_base = OTHER; note = N1-methylpseudouracil
  modified_base 3989: mod_base = OTHER; note = N1-methylpseudouracil
  modified_base 3997: mod_base = OTHER; note = N1-methylpseudouracil
  modified_base 4006: mod_base = OTHER; note = N1-methylpseudouracil
  modified_base 4009: mod_base = OTHER; note = N1-methylpseudouracil
  modified_base 4022: mod_base = OTHER; note = N1-methylpseudouracil
  modified_base 4024: mod_base = OTHER; note = N1-methylpseudouracil
  modified_base 4031: mod_base = OTHER; note = N1-methylpseudouracil
  modified_base 4043: mod_base = OTHER; note = N1-methylpseudouracil
  modified_base 4049: mod_base = OTHER; note = N1-methylpseudouracil
  modified_base 4054: mod_base = OTHER; note = N1-methylpseudouracil
  modified_base 4058: mod_base = OTHER; note = N1-methylpseudouracil
  modified_base 4061: mod_base = OTHER; note = N1-methylpseudouracil
  modified_base 4069: mod_base = OTHER; note = N1-methylpseudouracil
  modified_base 4070: mod_base = OTHER; note = N1-methylpseudouracil
  modified_base 4082: mod_base = OTHER; note = N1-methylpseudouracil
  modified_base 4087: mod_base = OTHER; note = N1-methylpseudouracil
  modified_base 4088: mod_base = OTHER; note = N1-methylpseudouracil
  modified_base 4091: mod_base = OTHER; note = N1-methylpseudouracil
  modified_base 4094: mod_base = OTHER; note = N1-methylpseudouracil
  modified_base 4097: mod_base = OTHER; note = N1-methylpseudouracil
  modified_base 4108: mod_base = OTHER; note = N1-methylpseudouracil
  modified_base 4112: mod_base = OTHER; note = N1-methylpseudouracil
  modified_base 4115: mod_base = OTHER; note = N1-methylpseudouracil
  modified_base 4136: mod_base = OTHER; note = N1-methylpseudouracil
  modified_base 4139: mod_base = OTHER; note = N1-methylpseudouracil
  modified_base 4141: mod_base = OTHER; note = N1-methylpseudouracil
  modified_base 4145: mod_base = OTHER; note = N1-methylpseudouracil
  modified_base 4157: mod_base = OTHER; note = N1-methylpseudouracil
  modified_base 4160: mod_base = OTHER; note = N1-methylpseudouracil
  modified_base 4175: mod_base = OTHER; note = N1-methylpseudouracil
  modified_base 4178: mod_base = OTHER; note = N1-methylpseudouracil
  modified_base 4181: mod_base = OTHER; note = N1-methylpseudouracil
  modified_base 4184: mod_base = OTHER; note = N1-methylpseudouracil
  modified_base 4195: mod_base = OTHER; note = N1-methylpseudouracil
  modified_base 4205: mod_base = OTHER; note = N1-methylpseudouracil
  modified_base 4209: mod_base = OTHER; note = N1-methylpseudouracil
  modified_base 4214: mod_base = OTHER; note = N1-methylpseudouracil
  modified_base 4219: mod_base = OTHER; note = N1-methylpseudouracil
  modified_base 4226: mod_base = OTHER; note = N1-methylpseudouracil
  modified_base 4229: mod_base = OTHER; note = N1-methylpseudouracil
  modified_base 4241: mod_base = OTHER; note = N1-methylpseudouracil
  modified_base 4252: mod_base = OTHER; note = N1-methylpseudouracil
  modified_base 4253: mod_base = OTHER; note = N1-methylpseudouracil
  modified_base 4261: mod_base = OTHER; note = N1-methylpseudouracil
  modified_base 4268: mod_base = OTHER; note = N1-methylpseudouracil
  modified_base 4271: mod_base = OTHER; note = N1-methylpseudouracil
  modified_base 4274: mod_base = OTHER; note = N1-methylpseudouracil
  modified_base 4276: mod_base = OTHER; note = N1-methylpseudouracil
  modified_base 4289: mod_base = OTHER; note = N1-methylpseudouracil
  modified_base 4296: mod_base = OTHER; note = N1-methylpseudouracil
  modified_base 4298: mod_base = OTHER; note = N1-methylpseudouracil
  modified_base 4301: mod_base = OTHER; note = N1-methylpseudouracil
  modified_base 4306: mod_base = OTHER; note = N1-methylpseudouracil
  modified_base 4315: mod_base = OTHER; note = N1-methylpseudouracil
  modified_base 4316: mod_base = OTHER; note = N1-methylpseudouracil
  modified_base 4319: mod_base = OTHER; note = N1-methylpseudouracil
  modified_base 4322: mod_base = OTHER; note = N1-methylpseudouracil
  modified_base 4325: mod_base = OTHER; note = N1-methylpseudouracil
  modified_base 4340: mod_base = OTHER; note = N1-methylpseudouracil
  modified_base 4348: mod_base = OTHER; note = N1-methylpseudouracil
  modified_base 4354: mod_base = OTHER; note = N1-methylpseudouracil
  modified_base 4358: mod_base = OTHER; note = N1-methylpseudouracil
  modified_base 4367: mod_base = OTHER; note = N1-methylpseudouracil
  modified_base 4370: mod_base = OTHER; note = N1-methylpseudouracil
  modified_base 4385: mod_base = OTHER; note = N1-methylpseudouracil
  modified_base 4387: mod_base = OTHER; note = N1-methylpseudouracil
  modified_base 4388: mod_base = OTHER; note = N1-methylpseudouracil
  modified_base 4398: mod_base = OTHER; note = N1-methylpseudouracil
  modified_base 4400: mod_base = OTHER; note = N1-methylpseudouracil
  modified_base 4402: mod_base = OTHER; note = N1-methylpseudouracil
  modified_base 4404: mod_base = OTHER; note = N1-methylpseudouracil
  modified_base 4413: mod_base = OTHER; note = N1-methylpseudouracil
  modified_base 4418: mod_base = OTHER; note = N1-methylpseudouracil
  modified_base 4424: mod_base = OTHER; note = N1-methylpseudouracil
  modified_base 4426: mod_base = OTHER; note = N1-methylpseudouracil
  modified_base 4427: mod_base = OTHER; note = N1-methylpseudouracil
  modified_base 4431: mod_base = OTHER; note = N1-methylpseudouracil
  modified_base 4450: mod_base = OTHER; note = N1-methylpseudouracil
  modified_base 4456: mod_base = OTHER; note = N1-methylpseudouracil
  modified_base 4458: mod_base = OTHER; note = N1-methylpseudouracil
  modified_base 4469: mod_base = OTHER; note = N1-methylpseudouracil
  modified_base 4478: mod_base = OTHER; note = N1-methylpseudouracil
  modified_base 4502: mod_base = OTHER; note = N1-methylpseudouracil
  modified_base 4509: mod_base = OTHER; note = N1-methylpseudouracil
  modified_base 4517: mod_base = OTHER; note = N1-methylpseudouracil
  modified_base 4519: mod_base = OTHER; note = N1-methylpseudouracil
  modified_base 4525: mod_base = OTHER; note = N1-methylpseudouracil
  modified_base 4537: mod_base = OTHER; note = N1-methylpseudouracil
  modified_base 4546: mod_base = OTHER; note = N1-methylpseudouracil
  modified_base 4547: mod_base = OTHER; note = N1-methylpseudouracil
  modified_base 4549: mod_base = OTHER; note = N1-methylpseudouracil
  modified_base 4553: mod_base = OTHER; note = N1-methylpseudouracil
  modified_base 4554: mod_base = OTHER; note = N1-methylpseudouracil
  modified_base 4557: mod_base = OTHER; note = N1-methylpseudouracil
  modified_base 4560: mod_base = OTHER; note = N1-methylpseudouracil
  modified_base 4565: mod_base = OTHER; note = N1-methylpseudouracil
  modified_base 4568: mod_base = OTHER; note = N1-methylpseudouracil
  modified_base 4571: mod_base = OTHER; note = N1-methylpseudouracil
  modified_base 4582: mod_base = OTHER; note = N1-methylpseudouracil
  modified_base 4590: mod_base = OTHER; note = N1-methylpseudouracil
  modified_base 4598: mod_base = OTHER; note = N1-methylpseudouracil
  modified_base 4601: mod_base = OTHER; note = N1-methylpseudouracil
  modified_base 4603: mod_base = OTHER; note = N1-methylpseudouracil
  modified_base 4604: mod_base = OTHER; note = N1-methylpseudouracil
  modified_base 4605: mod_base = OTHER; note = N1-methylpseudouracil
  modified_base 4609: mod_base = OTHER; note = N1-methylpseudouracil
  modified_base 4614: mod_base = OTHER; note = N1-methylpseudouracil
  modified_base 4616: mod_base = OTHER; note = N1-methylpseudouracil
  modified_base 4620: mod_base = OTHER; note = N1-methylpseudouracil
ggaggaaatcgcaaaatttgctcttcgcgttagatttcttttagttttctcgcaactagcaagctttttgttctcgccatgcagcggagccctctggagaaggccagcgtggtgagcaagctgttcttcagctggaccaggcccatcctgcgaaagggctacagacagaggctggagctgtccgacatctaccagattccatccgtggacagcgccgacaatctgagcgagaagctggagagggagtgggaccgcgagctggccagcaagaagaaccctaagctgatcaacgccctgcgccgctgcttcttctggaggttcatgttctacggcatcttcctgtacctgggcgaggtgaccaaggccgtccagcctctgctgctgggccgcatcatcgccagctacgatcccgacaacaaggaggaacgctccatcgccatctacctgggcatcggcctgtgtctgctgttcatcgtgcggaccctgctgctgcaccccgccatcttcggcctgcatcacatcggcatgcagatgaggatcgccatgttctccctgatctacaagaagaccctgaagctgtccagccgcgtgctggataagatcagcatcgggcagctggtgagcctgctgagcaacaacctgaacaagttcgacgaggggttggcgctggcccacttcgtgtggattgccccgctgcaggtggctctgctgatggggctgatctgggagctgctgcaggcctctgccttctgcgggctggggtttctgatcgtgctggccctgttccaagctggcctgggccgcatgatgatgaagtaccgcgatcagagggccggcaagatcagcgagcgcctggtgatcactagcgagatgatagagaacatccagagcgtgaaggcttactgttgggaggaggccatggagaagatgatcgagaacctgaggcagaccgagctgaagctgactagaaaggcagcctacgtgaggtatttcaactccagcgccttcttcttcagcggcttcttcgtggtgttcctgagcgtgctgccctacgccctgatcaagggcatcatcctgaggaagatcttcaccaccattagcttctgcatcgtgctgcgcatggccgtgaccaggcagttcccttgggccgtgcagacttggtacgacagcctgggagccatcaacaagatccaggactttctgcagaagcaggaatataagaccctggagtacaacctgaccaccaccgaggtggtgatggagaacgtgaccgccttctgggaggagggcttcggcgagctgttcgagaaggccaagcagaacaataacaaccgcaagaccagcaacggcgacgactccctcttcttcagcaactttagcctgctgggcacccctgtgctgaaggacatcaacttcaagatcgaaagaggccaactgctggccgtggccggatctaccggcgccggcaagaccagcctgctgatgatgatcatgggcgagctggagcccagcgagggcaagatcaagcacagcggccggatctccttctgctcccagttctcctggatcatgcccggcaccatcaaggagaacatcatcttcggcgtgagctacgacgagtacaggtaccggagcgtgatcaaggcctgccagctggaggaggacatctccaaatttgccgagaaggacaacattgtgctgggcgaaggcgggatcaccctgtccggtggccagcgtgcacgcatctccctggcccgggctgtgtacaaggacgccgacctgtacctgctggacagcccttttggctacctggacgtgctgaccgagaaggagatcttcgagtcctgcgtgtgtaagctgatggccaacaagaccagaatcctggtgaccagcaagatggagcatctgaagaaggccgacaagatcctgatcctgcacgaggggtccagctacttctacggcaccttcagcgagctgcagaacctgcagcccgacttcagctccaagctgatgggctgcgatagcttcgaccagttctccgccgagagaaggaactccattctgaccgagaccctgcaccgattctccctggagggagacgccccagtgagctggaccgagaccaagaagcagagcttcaagcagaccggcgagttcggagagaagcgcaagaactccatcctcaaccccatcaacagcatccggaagttcagcatcgtgcagaagacccctctgcagatgaacgggatcgaggaggacagcgacgagcccctggaacggcgactgtccctcgtgcccgacagcgagcagggcgaggccatcctgccccggatctccgtgatctccactgggcccaccctgcaagcccgacggcggcaaagcgtgctgaacctgatgacccacagcgtgaaccagggccagaatatccaccgcaagactacagccagcacccgcaaggtgagcctggctccccaggccaacctgaccgagctggacatctacagcaggaggctgagccaggagacaggcctggagatcagcgaggagatcaacgaggaggacctgaaggagtgcttcttcgacgacatggagtccatccccgccgtgaccacctggaacacctacctgagatacatcaccgtgcacaagagcctgatcttcgtgctgatctggtgcctggtgatcttcttggccgaggtagccgcctcactggtggtgctgtggctgctgggcaataccccactgcaggacaaggggaactccacccacagccggaacaacagctacgccgtgatcatcacctccaccagcagctactacgtgttctacatctacgtgggcgtggccgacacactgctggccatgggcttcttcagaggcctccctctggtgcacacactgatcaccgtgagcaagatcctgcaccacaagatgctgcacagcgtgctgcaggctcccatgtcaaccctgaacaccctgaaggccggcggcatcctgaacaggttcagcaaggacatcgccattctggacgatctgctgcccctgaccatcttcgacttcatccagctgctgctgatcgtgatcggggccatcgccgtggtggccgtgctgcagccctacatcttcgtggccacagtgcccgtgatcgtggccttcatcatgctgcgcgcctacttcctgcagacctcccagcagctgaagcagctggagagcgaaggccgcagccccatcttcacccacctggtgactagcctgaaggggctgtggaccctgcgcgccttcggcaggcagccctacttcgagaccctgttccacaaggctctgaacctgcacaccgccaactggttcctgtacctcagcaccctgcgctggttccagatgcggatcgagatgatcttcgtgatcttcttcatcgccgtgaccttcatctccatcctgaccaccggggaaggcgagggacgggtgggaatcatcctgaccctggccatgaatatcatgagcaccctgcagtgggccgtgaacagcagcatcgacgtggacagcctgatgcggtccgtgtcccgggtgttcaagttcatcgacatgcccaccgagggcaagcccaccaagagcaccaagccctacaagaacggccagctgagcaaggtgatgattatcgagaacagccacgtgaagaaggacgacatctggccttccggcggccagatgaccgtgaaggacctgaccgccaagtacaccgagggcggcaacgccatcctggagaacatcagcttctccattagccctggacagcgggtgggcctgttgggacggaccggcagtgggaagagcaccctgctgtccgccttcctgcggctgctgaacacggagggcgagatccagatcgacggggtgagctgggacagcatcaccctgcagcagtggcgaaaggccttcggcgtgatcccacagaaggtgtttattttctctggcacctttaggaagaacctggacccctacgagcagtggtccgaccaggagatctggaaggtggccgacgaggtgggcctgcggtcagtgatcgagcagttccccggcaagctggacttcgtgctggtggacggcggctgcgtgctgagccacggccacaagcagctgatgtgcctggcacgcagcgtgctgagcaaggccaagatcctgctgctggacgagccctccgcgcacctggatcccgtgacctaccagatcatcaggcggaccctgaagcaggccttcgccgactgcaccgtgatcctgtgcgagagcagaatcgaggctatgctggagtgccagcagttcctggtgatcgaggagaacaaggtgcggcagtacgactccatccagaagctgctgaacgagcgcagcctgttcagacaggctatctctcccagcgatcgcgtgaagctgttccctcacaggaacagcagcaagtgcaagtctaagccacagatcgccgccctgaaggaggagaccgaggaggaggtgcaggatacccgcctgtaaagctccccgggggcctccaccgcgttatccgttcctcgtaggctggtcctggggaacgggtcggcgggtacccccgtggtctttgaataaagtctgagtgggcggcaaaaaaaaaaaaaaaaaaaaaaaaaaaaaaaaaaaaaaaaaaaaaaaaaaaaaaaaaaaaaaaaaaaaaaaaaaaaaaaaaaaaaaaaaaaaaaaaaaaa

SEQ ID NO: 22 - RNA, 4631 nt, synthetic construct
  source 1..4631: mol_type = other RNA
  modified_base 1: mod_base = OTHER; note = 7-Methylguanosine with triphosphate linkage
  modified_base 2: mod_base = OTHER; note = 2'-O-methyl modified nucleotide
  modified_base 9: mod_base = OTHER; note = N1-methylpseudouracil
  modified_base 17: mod_base = OTHER; note = N1-methylpseudouracil
  modified_base 18: mod_base = OTHER; note = N1-methylpseudouracil
  modified_base 19: mod_base = OTHER; note = N1-methylpseudouracil
  modified_base 22: mod_base = OTHER; note = N1-methylpseudouracil
  modified_base 24: mod_base = OTHER; note = N1-methylpseudouracil
  modified_base 25: mod_base = OTHER; note = N1-methylpseudouracil
  modified_base 30: mod_base = OTHER; note = N1-methylpseudouracil
  modified_base 31: mod_base = OTHER; note = N1-methylpseudouracil
  modified_base 35: mod_base = OTHER; note = N1-methylpseudouracil
  modified_base 36: mod_base = OTHER; note = N1-methylpseudouracil
  modified_base 37: mod_base = OTHER; note = N1-methylpseudouracil
  modified_base 39: mod_base = OTHER; note = N1-methylpseudouracil
  modified_base 40: mod_base = OTHER; note = N1-methylpseudouracil
  modified_base 41: mod_base = OTHER; note = N1-methylpseudouracil
  modified_base 42: mod_base = OTHER; note = N1-methylpseudouracil
  modified_base 45: mod_base = OTHER; note = N1-methylpseudouracil
  modified_base 46: mod_base = OTHER; note = N1-methylpseudouracil
  modified_base 47: mod_base = OTHER; note = N1-methylpseudouracil
  modified_base 48: mod_base = OTHER; note = N1-methylpseudouracil
  modified_base 50: mod_base = OTHER; note = N1-methylpseudouracil
  modified_base 57: mod_base = OTHER; note = N1-methylpseudouracil
  modified_base 65: mod_base = OTHER; note = N1-methylpseudouracil
  modified_base 66: mod_base = OTHER; note = N1-methylpseudouracil
  modified_base 67: mod_base = OTHER; note = N1-methylpseudouracil
  modified_base 68: mod_base = OTHER; note = N1-methylpseudouracil
  modified_base 69: mod_base = OTHER; note = N1-methylpseudouracil
  modified_base 71: mod_base = OTHER; note = N1-methylpseudouracil
  modified_base 72: mod_base = OTHER; note = N1-methylpseudouracil
  modified_base 74: mod_base = OTHER; note = N1-methylpseudouracil
  modified_base 80: mod_base = OTHER; note = N1-methylpseudouracil
  modified_base 93: mod_base = OTHER; note = N1-methylpseudouracil
  modified_base 95: mod_base = OTHER; note = N1-methylpseudouracil
  modified_base 110: mod_base = OTHER; note = N1-methylpseudouracil
  modified_base 113: mod_base = OTHER; note = N1-methylpseudouracil
  modified_base 122: mod_base = OTHER; note = N1-methylpseudouracil
  modified_base 124: mod_base = OTHER; note = N1-methylpseudouracil
  modified_base 125: mod_base = OTHER; note = N1-methylpseudouracil
  modified_base 127: mod_base = OTHER; note = N1-methylpseudouracil
  modified_base 128: mod_base = OTHER; note = N1-methylpseudouracil
  modified_base 133: mod_base = OTHER; note = N1-methylpseudouracil
  modified_base 146: mod_base = OTHER; note = N1-methylpseudouracil
  modified_base 149: mod_base = OTHER; note = N1-methylpseudouracil
  modified_base 160: mod_base = OTHER; note = N1-methylpseudouracil
  modified_base 173: mod_base = OTHER; note = N1-methylpseudouracil
  modified_base 179: mod_base = OTHER; note = N1-methylpseudouracil
  modified_base 181: mod_base = OTHER; note = N1-methylpseudouracil
  modified_base 188: mod_base = OTHER; note = N1-methylpseudouracil
  modified_base 190: mod_base = OTHER; note = N1-methylpseudouracil
  modified_base 197: mod_base = OTHER; note = N1-methylpseudouracil
  modified_base 198: mod_base = OTHER; note = N1-methylpseudouracil
  modified_base 202: mod_base = OTHER; note = N1-methylpseudouracil
  modified_base 206: mod_base = OTHER; note = N1-methylpseudouracil
  modified_base 222: mod_base = OTHER; note = N1-methylpseudouracil
  modified_base 224: mod_base = OTHER; note = N1-methylpseudouracil
  modified_base 236: mod_base = OTHER; note = N1-methylpseudouracil
  modified_base 247: mod_base = OTHER; note = N1-methylpseudouracil
  modified_base 260: mod_base = OTHER; note = N1-methylpseudouracil
  modified_base 279: mod_base = OTHER; note = N1-methylpseudouracil
  modified_base 284: mod_base = OTHER; note = N1-methylpseudouracil
  modified_base 287: mod_base = OTHER; note = N1-methylpseudouracil
  modified_base 296: mod_base = OTHER; note = N1-methylpseudouracil
  modified_base 304: mod_base = OTHER; note = N1-methylpseudouracil
  modified_base 307: mod_base = OTHER; note = N1-methylpseudouracil
  modified_base 308: mod_base = OTHER; note = N1-methylpseudouracil
  modified_base 310: mod_base = OTHER; note = N1-methylpseudouracil
  modified_base 311: mod_base = OTHER; note = N1-methylpseudouracil
  modified_base 313: mod_base = OTHER; note = N1-methylpseudouracil
  modified_base 319: mod_base = OTHER; note = N1-methylpseudouracil
  modified_base 320: mod_base = OTHER; note = N1-methylpseudouracil
  modified_base 323: mod_base = OTHER; note = N1-methylpseudouracil
  modified_base 325: mod_base = OTHER; note = N1-methylpseudouracil
  modified_base 326: mod_base = OTHER; note = N1-methylpseudouracil
  modified_base 328: mod_base = OTHER; note = N1-methylpseudouracil
  modified_base 335: mod_base = OTHER; note = N1-methylpseudouracil
  modified_base 337: mod_base = OTHER; note = N1-methylpseudouracil
  modified_base 338: mod_base = OTHER; note = N1-methylpseudouracil
  modified_base 341: mod_base = OTHER; note = N1-methylpseudouracil
  modified_base 343: mod_base = OTHER; note = N1-methylpseudouracil
  modified_base 347: mod_base = OTHER; note = N1-methylpseudouracil
  modified_base 356: mod_base = OTHER; note = N1-methylpseudouracil
  modified_base 368: mod_base = OTHER; note = N1-methylpseudouracil
  modified_base 375: mod_base = OTHER; note = N1-methylpseudouracil
  modified_base 377: mod_base = OTHER; note = N1-methylpseudouracil
  modified_base 380: mod_base = OTHER; note = N1-methylpseudouracil
  modified_base 383: mod_base = OTHER; note = N1-methylpseudouracil
  modified_base 392: mod_base = OTHER; note = N1-methylpseudouracil
  modified_base 395: mod_base = OTHER; note = N1-methylpseudouracil
  modified_base 403: mod_base = OTHER; note = N1-methylpseudouracil
  modified_base 408: mod_base = OTHER; note = N1-methylpseudouracil
  modified_base 430: mod_base = OTHER; note = N1-methylpseudouracil
  modified_base 434: mod_base = OTHER; note = N1-methylpseudouracil
  modified_base 440: mod_base = OTHER; note = N1-methylpseudouracil
  modified_base 442: mod_base = OTHER; note = N1-methylpseudouracil
  modified_base 446: mod_base = OTHER; note = N1-methylpseudouracil
  modified_base 452: mod_base = OTHER; note = N1-methylpseudouracil
  modified_base 458: mod_base = OTHER; note = N1-methylpseudouracil
  modified_base 460: mod_base = OTHER; note = N1-methylpseudouracil
  modified_base 462: mod_base = OTHER; note = N1-methylpseudouracil
  modified_base 464: mod_base = OTHER; note = N1-methylpseudouracil
  modified_base 467: mod_base = OTHER; note = N1-methylpseudouracil
  modified_base 469: mod_base = OTHER; note = N1-methylpseudouracil
  modified_base 470: mod_base = OTHER; note = N1-methylpseudouracil
  modified_base 473: mod_base = OTHER; note = N1-methylpseudouracil
  modified_base 476: mod_base = OTHER; note = N1-methylpseudouracil
  modified_base 485: mod_base = OTHER; note = N1-methylpseudouracil
  modified_base 488: mod_base = OTHER; note = N1-methylpseudouracil
  modified_base 491: mod_base = OTHER; note = N1-methylpseudouracil
  modified_base 503: mod_base = OTHER; note = N1-methylpseudouracil
  modified_base 505: mod_base = OTHER; note = N1-methylpseudouracil
  modified_base 506: mod_base = OTHER; note = N1-methylpseudouracil
  modified_base 512: mod_base = OTHER; note = N1-methylpseudouracil
  modified_base 516: mod_base = OTHER; note = N1-methylpseudouracil
  modified_base 521: mod_base = OTHER; note = N1-methylpseudouracil
  modified_base 527: mod_base = OTHER; note = N1-methylpseudouracil
  modified_base 533: mod_base = OTHER; note = N1-methylpseudouracil
  modified_base 539: mod_base = OTHER; note = N1-methylpseudouracil
  modified_base 545: mod_base = OTHER; note = N1-methylpseudouracil
  modified_base 547: mod_base = OTHER; note = N1-methylpseudouracil
  modified_base 548: mod_base = OTHER; note = N1-methylpseudouracil
  modified_base 550: mod_base = OTHER; note = N1-methylpseudouracil
  modified_base 554: mod_base = OTHER; note = N1-methylpseudouracil
  modified_base 557: mod_base = OTHER; note = N1-methylpseudouracil
  modified_base 559: mod_base = OTHER; note = N1-methylpseudouracil
  modified_base 572: mod_base = OTHER; note = N1-methylpseudouracil
  modified_base 578: mod_base = OTHER; note = N1-methylpseudouracil
  modified_base 580: mod_base = OTHER; note = N1-methylpseudouracil
  modified_base 590: mod_base = OTHER; note = N1-methylpseudouracil
  modified_base 593: mod_base = OTHER; note = N1-methylpseudouracil
  modified_base 597: mod_base = OTHER; note = N1-methylpseudouracil
  modified_base 602: mod_base = OTHER; note = N1-methylpseudouracil
  modified_base 608: mod_base = OTHER; note = N1-methylpseudouracil
  modified_base 617: mod_base = OTHER; note = N1-methylpseudouracil
  modified_base 620: mod_base = OTHER; note = N1-methylpseudouracil
  modified_base 626: mod_base = OTHER; note = N1-methylpseudouracil
  modified_base 629: mod_base = OTHER; note = N1-methylpseudouracil
  modified_base 641: mod_base = OTHER; note = N1-methylpseudouracil
  modified_base 649: mod_base = OTHER; note = N1-methylpseudouracil
  modified_base 650: mod_base = OTHER; note = N1-methylpseudouracil
  modified_base 661: mod_base = OTHER; note = N1-methylpseudouracil
  modified_base 662: mod_base = OTHER; note = N1-methylpseudouracil
  modified_base 668: mod_base = OTHER; note = N1-methylpseudouracil
  modified_base 676: mod_base = OTHER; note = N1-methylpseudouracil
  modified_base 677: mod_base = OTHER; note = N1-methylpseudouracil
  modified_base 680: mod_base = OTHER; note = N1-methylpseudouracil
  modified_base 682: mod_base = OTHER; note = N1-methylpseudouracil
  modified_base 686: mod_base = OTHER; note = N1-methylpseudouracil
  modified_base 687: mod_base = OTHER; note = N1-methylpseudouracil
  modified_base 695: mod_base = OTHER; note = N1-methylpseudouracil
  modified_base 701: mod_base = OTHER; note = N1-methylpseudouracil
  modified_base 705: mod_base = OTHER; note = N1-methylpseudouracil
  modified_base 707: mod_base = OTHER; note = N1-methylpseudouracil
  modified_base 710: mod_base = OTHER; note = N1-methylpseudouracil
  modified_base 713: mod_base = OTHER; note = N1-methylpseudouracil
  modified_base 719: mod_base = OTHER; note = N1-methylpseudouracil
  modified_base 722: mod_base = OTHER; note = N1-methylpseudouracil
  modified_base 724: mod_base = OTHER; note = N1-methylpseudouracil
  modified_base 731: mod_base = OTHER; note = N1-methylpseudouracil
  modified_base 734: mod_base = OTHER; note = N1-methylpseudouracil
  modified_base 742: mod_base = OTHER; note = N1-methylpseudouracil
  modified_base 744: mod_base = OTHER; note = N1-methylpseudouracil
  modified_base 748: mod_base = OTHER; note = N1-methylpseudouracil
  modified_base 749: mod_base = OTHER; note = N1-methylpseudouracil
  modified_base 751: mod_base = OTHER; note = N1-methylpseudouracil
  modified_base 758: mod_base = OTHER; note = N1-methylpseudouracil
  modified_base 763: mod_base = OTHER; note = N1-methylpseudouracil
  modified_base 764: mod_base = OTHER; note = N1-methylpseudouracil
  modified_base 765: mod_base = OTHER; note = N1-methylpseudouracil
  modified_base 767: mod_base = OTHER; note = N1-methylpseudouracil
  modified_base 770: mod_base = OTHER; note = N1-methylpseudouracil
  modified_base 773: mod_base = OTHER; note = N1-methylpseudouracil
  modified_base 776: mod_base = OTHER; note = N1-methylpseudouracil
  modified_base 782: mod_base = OTHER; note = N1-methylpseudouracil
  modified_base 784: mod_base = OTHER; note = N1-methylpseudouracil
  modified_base 785: mod_base = OTHER; note = N1-methylpseudouracil
  modified_base 792: mod_base = OTHER; note = N1-methylpseudouracil
  modified_base 797: mod_base = OTHER; note = N1-methylpseudouracil
  modified_base 806: mod_base = OTHER; note = N1-methylpseudouracil
  modified_base 809: mod_base = OTHER; note = N1-methylpseudouracil
  modified_base 812: mod_base = OTHER; note = N1-methylpseudouracil
  modified_base 817: mod_base = OTHER; note = N1-methylpseudouracil
  modified_base 825: mod_base = OTHER; note = N1-methylpseudouracil
  modified_base 842: mod_base = OTHER; note = N1-methylpseudouracil
  modified_base 854: mod_base = OTHER; note = N1-methylpseudouracil
  modified_base 857: mod_base = OTHER; note = N1-methylpseudouracil
  modified_base 860: mod_base = OTHER; note = N1-methylpseudouracil
  modified_base 864: mod_base = OTHER; note = N1-methylpseudouracil
  modified_base 872: mod_base = OTHER; note = N1-methylpseudouracil
  modified_base 875: mod_base = OTHER; note = N1-methylpseudouracil
  modified_base 884: mod_base = OTHER; note = N1-methylpseudouracil
  modified_base 893: mod_base = OTHER; note = N1-methylpseudouracil
  modified_base 900: mod_base = OTHER; note = N1-methylpseudouracil
  modified_base 901: mod_base = OTHER; note = N1-methylpseudouracil
  modified_base 904: mod_base = OTHER; note = N1-methylpseudouracil
  modified_base 906: mod_base = OTHER; note = N1-methylpseudouracil
  modified_base 907: mod_base = OTHER; note = N1-methylpseudouracil
  modified_base 920: mod_base = OTHER; note = N1-methylpseudouracil
  modified_base 929: mod_base = OTHER; note = N1-methylpseudouracil
  modified_base 932: mod_base = OTHER; note = N1-methylpseudouracil
  modified_base 941: mod_base = OTHER; note = N1-methylpseudouracil
  modified_base 956: mod_base = OTHER; note = N1-methylpseudouracil
  modified_base 962: mod_base = OTHER; note = N1-methylpseudouracil
  modified_base 966: mod_base = OTHER; note = N1-methylpseudouracil
  modified_base 979: mod_base = OTHER; note = N1-methylpseudouracil
  modified_base 983: mod_base = OTHER; note = N1-methylpseudouracil
  modified_base 988: mod_base = OTHER; note = N1-methylpseudouracil
  modified_base 990: mod_base = OTHER; note = N1-methylpseudouracil
  modified_base 991: mod_base = OTHER; note = N1-methylpseudouracil
  modified_base 992: mod_base = OTHER; note = N1-methylpseudouracil
  modified_base 997: mod_base = OTHER; note = N1-methylpseudouracil
  modified_base 1006: mod_base = OTHER; note = N1-methylpseudouracil
  modified_base 1007: mod_base = OTHER; note = N1-methylpseudouracil
  modified_base 1009: mod_base = OTHER; note = N1-methylpseudouracil
  modified_base 1010: mod_base = OTHER; note = N1-methylpseudouracil
  modified_base 1012: mod_base = OTHER; note = N1-methylpseudouracil
  modified_base 1013: mod_base = OTHER; note = N1-methylpseudouracil
  modified_base 1021: mod_base = OTHER; note = N1-methylpseudouracil
  modified_base 1022: mod_base = OTHER; note = N1-methylpseudouracil
  modified_base 1024: mod_base = OTHER; note = N1-methylpseudouracil
  modified_base 1025: mod_base = OTHER; note = N1-methylpseudouracil
  modified_base 1028: mod_base = OTHER; note = N1-methylpseudouracil
  modified_base 1031: mod_base = OTHER; note = N1-methylpseudouracil
  modified_base 1033: mod_base = OTHER; note = N1-methylpseudouracil
  modified_base 1034: mod_base = OTHER; note = N1-methylpseudouracil
  modified_base 1037: mod_base = OTHER; note = N1-methylpseudouracil
  modified_base 1043: mod_base = OTHER; note = N1-methylpseudouracil
  modified_base 1046: mod_base = OTHER; note = N1-methylpseudouracil
  modified_base 1051: mod_base = OTHER; note = N1-methylpseudouracil
  modified_base 1058: mod_base = OTHER; note = N1-methylpseudouracil
  modified_base 1061: mod_base = OTHER; note = N1-methylpseudouracil
  modified_base 1070: mod_base = OTHER; note = N1-methylpseudouracil
  modified_base 1073: mod_base = OTHER; note = N1-methylpseudouracil
  modified_base 1076: mod_base = OTHER; note = N1-methylpseudouracil
  modified_base 1085: mod_base = OTHER; note = N1-methylpseudouracil
  modified_base 1087: mod_base = OTHER; note = N1-methylpseudouracil
  modified_base 1088: mod_base = OTHER; note = N1-methylpseudouracil
  modified_base 1097: mod_base = OTHER; note = N1-methylpseudouracil
  modified_base 1098: mod_base = OTHER; note = N1-methylpseudouracil
  modified_base 1102: mod_base = OTHER; note = N1-methylpseudouracil
  modified_base 1103: mod_base = OTHER; note = N1-methylpseudouracil
  modified_base 1105: mod_base = OTHER; note = N1-methylpseudouracil
  modified_base 1109: mod_base = OTHER; note = N1-methylpseudouracil
  modified_base 1112: mod_base = OTHER; note = N1-methylpseudouracil
  modified_base 1115: mod_base = OTHER; note = N1-methylpseudouracil
  modified_base 1121: mod_base = OTHER; note = N1-methylpseudouracil
  modified_base 1127: mod_base = OTHER; note = N1-methylpseudouracil
  modified_base 1138: mod_base = OTHER; note = N1-methylpseudouracil
  modified_base 1139: mod_base = OTHER; note = N1-methylpseudouracil
  modified_base 1143: mod_base = OTHER; note = N1-methylpseudouracil
  modified_base 1144: mod_base = OTHER; note = N1-methylpseudouracil
  modified_base 1151: mod_base = OTHER; note = N1-methylpseudouracil
  modified_base 1158: mod_base = OTHER; note = N1-methylpseudouracil
  modified_base 1159: mod_base = OTHER; note = N1-methylpseudouracil
  modified_base 1162: mod_base = OTHER; note = N1-methylpseudouracil
  modified_base 1172: mod_base = OTHER; note = N1-methylpseudouracil
  modified_base 1181: mod_base = OTHER; note = N1-methylpseudouracil
  modified_base 1190: mod_base = OTHER; note = N1-methylpseudouracil
  modified_base 1198: mod_base = OTHER; note = N1-methylpseudouracil
  modified_base 1199: mod_base = OTHER; note = N1-methylpseudouracil
  modified_base 1200: mod_base = OTHER; note = N1-methylpseudouracil
  modified_base 1202: mod_base = OTHER; note = N1-methylpseudouracil
  modified_base 1216: mod_base = OTHER; note = N1-methylpseudouracil
  modified_base 1218: mod_base = OTHER; note = N1-methylpseudouracil
  modified_base 1226: mod_base = OTHER; note = N1-methylpseudouracil
  modified_base 1231: mod_base = OTHER; note = N1-methylpseudouracil
  modified_base 1238: mod_base = OTHER; note = N1-methylpseudouracil
  modified_base 1253: mod_base = OTHER; note = N1-methylpseudouracil
  modified_base 1256: mod_base = OTHER; note = N1-methylpseudouracil
  modified_base 1259: mod_base = OTHER; note = N1-methylpseudouracil
  modified_base 1268: mod_base = OTHER; note = N1-methylpseudouracil
  modified_base 1276: mod_base = OTHER; note = N1-methylpseudouracil
  modified_base 1277: mod_base = OTHER; note = N1-methylpseudouracil
  modified_base 1279: mod_base = OTHER; note = N1-methylpseudouracil
  modified_base 1289: mod_base = OTHER; note = N1-methylpseudouracil
  modified_base 1299: mod_base = OTHER; note = N1-methylpseudouracil
  modified_base 1301: mod_base = OTHER; note = N1-methylpseudouracil
  modified_base 1304: mod_base = OTHER; note = N1-methylpseudouracil
  modified_base 1313: mod_base = OTHER; note = N1-methylpseudouracil
  modified_base 1318: mod_base = OTHER; note = N1-methylpseudouracil
  modified_base 1319: mod_base = OTHER; note = N1-methylpseudouracil
  modified_base 1325: mod_base = OTHER; note = N1-methylpseudouracil
  modified_base 1340: mod_base = OTHER; note = N1-methylpseudouracil
  modified_base 1343: mod_base = OTHER; note = N1-methylpseudouracil
  modified_base 1349: mod_base = OTHER; note = N1-methylpseudouracil
  modified_base 1357: mod_base = OTHER; note = N1-methylpseudouracil
  modified_base 1359: mod_base = OTHER; note = N1-methylpseudouracil
  modified_base 1382: mod_base = OTHER; note = N1-methylpseudouracil
  modified_base 1385: mod_base = OTHER; note = N1-methylpseudouracil
  modified_base 1388: mod_base = OTHER; note = N1-methylpseudouracil
  modified_base 1391: mod_base = OTHER; note = N1-methylpseudouracil
  modified_base 1394: mod_base = OTHER; note = N1-methylpseudouracil
  modified_base 1397: mod_base = OTHER; note = N1-methylpseudouracil
  modified_base 1406: mod_base = OTHER; note = N1-methylpseudouracil
  modified_base 1427: mod_base = OTHER; note = N1-methylpseudouracil
  modified_base 1445: mod_base = OTHER; note = N1-methylpseudouracil
  modified_base 1447: mod_base = OTHER; note = N1-methylpseudouracil
  modified_base 1450: mod_base = OTHER; note = N1-methylpseudouracil
  modified_base 1451: mod_base = OTHER; note = N1-methylpseudouracil
  modified_base 1453: mod_base = OTHER; note = N1-methylpseudouracil
  modified_base 1462: mod_base = OTHER; note = N1-methylpseudouracil
  modified_base 1463: mod_base = OTHER; note = N1-methylpseudouracil
  modified_base 1465: mod_base = OTHER; note = N1-methylpseudouracil
  modified_base 1468: mod_base = OTHER; note = N1-methylpseudouracil
  modified_base 1472: mod_base = OTHER; note = N1-methylpseudouracil
  modified_base 1475: mod_base = OTHER; note = N1-methylpseudouracil
  modified_base 1487: mod_base = OTHER; note = N1-methylpseudouracil
  modified_base 1499: mod_base = OTHER; note = N1-methylpseudouracil
  modified_base 1502: mod_base = OTHER; note = N1-methylpseudouracil
  modified_base 1504: mod_base = OTHER; note = N1-methylpseudouracil
  modified_base 1505: mod_base = OTHER; note = N1-methylpseudouracil
  modified_base 1511: mod_base = OTHER; note = N1-methylpseudouracil
  modified_base 1516: mod_base = OTHER; note = N1-methylpseudouracil
  modified_base 1525: mod_base = OTHER; note = N1-methylpseudouracil
  modified_base 1531: mod_base = OTHER; note = N1-methylpseudouracil
  modified_base 1541: mod_base = OTHER; note = N1-methylpseudouracil
  modified_base 1544: mod_base = OTHER; note = N1-methylpseudouracil
  modified_base 1552: mod_base = OTHER; note = N1-methylpseudouracil
  modified_base 1559: mod_base = OTHER; note = N1-methylpseudouracil
  modified_base 1571: mod_base = OTHER; note = N1-methylpseudouracil
  modified_base 1573: mod_base = OTHER; note = N1-methylpseudouracil
  modified_base 1579: mod_base = OTHER; note = N1-methylpseudouracil
  modified_base 1580: mod_base = OTHER; note = N1-methylpseudouracil
  modified_base 1581: mod_base = OTHER; note = N1-methylpseudouracil
  modified_base 1601: mod_base = OTHER; note = N1-methylpseudouracil
  modified_base 1604: mod_base = OTHER; note = N1-methylpseudouracil
  modified_base 1619: mod_base = OTHER; note = N1-methylpseudouracil
  modified_base 1625: mod_base = OTHER; note = N1-methylpseudouracil
  modified_base 1627: mod_base = OTHER; note = N1-methylpseudouracil
  modified_base 1632: mod_base = OTHER; note = N1-methylpseudouracil
  modified_base 1641: mod_base = OTHER; note = N1-methylpseudouracil
  modified_base 1649: mod_base = OTHER; note = N1-methylpseudouracil
  modified_base 1651: mod_base = OTHER; note = N1-methylpseudouracil
  modified_base 1655: mod_base = OTHER; note = N1-methylpseudouracil
  modified_base 1665: mod_base = OTHER; note = N1-methylpseudouracil
  modified_base 1667: mod_base = OTHER; note = N1-methylpseudouracil
  modified_base 1669: mod_base = OTHER; note = N1-methylpseudouracil
  modified_base 1685: mod_base = OTHER; note = N1-methylpseudouracil
  modified_base 1687: mod_base = OTHER; note = N1-methylpseudouracil
  modified_base 1691: mod_base = OTHER; note = N1-methylpseudouracil
  modified_base 1694: mod_base = OTHER; note = N1-methylpseudouracil
  modified_base 1704: mod_base = OTHER; note = N1-methylpseudouracil
  modified_base 1705: mod_base = OTHER; note = N1-methylpseudouracil
  modified_base 1706: mod_base = OTHER; note = N1-methylpseudouracil
  modified_base 1707: mod_base = OTHER; note = N1-methylpseudouracil
  modified_base 1711: mod_base = OTHER; note = N1-methylpseudouracil
  modified_base 1715: mod_base = OTHER; note = N1-methylpseudouracil
  modified_base 1721: mod_base = OTHER; note = N1-methylpseudouracil
  modified_base 1724: mod_base = OTHER; note = N1-methylpseudouracil
  modified_base 1739: mod_base = OTHER; note = N1-methylpseudouracil
  modified_base 1741: mod_base = OTHER; note = N1-methylpseudouracil
  modified_base 1742: mod_base = OTHER; note = N1-methylpseudouracil
  modified_base 1747: mod_base = OTHER; note = N1-methylpseudouracil
  modified_base 1750: mod_base = OTHER; note = N1-methylpseudouracil
  modified_base 1754: mod_base = OTHER; note = N1-methylpseudouracil
  modified_base 1756: mod_base = OTHER; note = N1-methylpseudouracil
  modified_base 1758: mod_base = OTHER; note = N1-methylpseudouracil
  modified_base 1763: mod_base = OTHER; note = N1-methylpseudouracil
  modified_base 1766: mod_base = OTHER; note = N1-methylpseudouracil
  modified_base 1784: mod_base = OTHER; note = N1-methylpseudouracil
  modified_base 1787: mod_base = OTHER; note = N1-methylpseudouracil
  modified_base 1790: mod_base = OTHER; note = N1-methylpseudouracil
  modified_base 1802: mod_base = OTHER; note = N1-methylpseudouracil
  modified_base 1809: mod_base = OTHER; note = N1-methylpseudouracil
  modified_base 1811: mod_base = OTHER; note = N1-methylpseudouracil
  modified_base 1829: mod_base = OTHER; note = N1-methylpseudouracil
  modified_base 1832: mod_base = OTHER; note = N1-methylpseudouracil
  modified_base 1835: mod_base = OTHER; note = N1-methylpseudouracil
  modified_base 1838: mod_base = OTHER; note = N1-methylpseudouracil
  modified_base 1849: mod_base = OTHER; note = N1-methylpseudouracil
  modified_base 1855: mod_base = OTHER; note = N1-methylpseudouracil
  modified_base 1858: mod_base = OTHER; note = N1-methylpseudouracil
  modified_base 1859: mod_base = OTHER; note = N1-methylpseudouracil
  modified_base 1861: mod_base = OTHER; note = N1-methylpseudouracil
  modified_base 1870: mod_base = OTHER; note = N1-methylpseudouracil
  modified_base 1871: mod_base = OTHER; note = N1-methylpseudouracil
  modified_base 1880: mod_base = OTHER; note = N1-methylpseudouracil
  modified_base 1889: mod_base = OTHER; note = N1-methylpseudouracil
  modified_base 1900: mod_base = OTHER; note = N1-methylpseudouracil
  modified_base 1901: mod_base = OTHER; note = N1-methylpseudouracil
  modified_base 1906: mod_base = OTHER; note = N1-methylpseudouracil
  modified_base 1913: mod_base = OTHER; note = N1-methylpseudouracil
  modified_base 1916: mod_base = OTHER; note = N1-methylpseudouracil
  modified_base 1921: mod_base = OTHER; note = N1-methylpseudouracil
  modified_base 1926: mod_base = OTHER; note = N1-methylpseudouracil
  modified_base 1930: mod_base = OTHER; note = N1-methylpseudouracil
  modified_base 1931: mod_base = OTHER; note = N1-methylpseudouracil
  modified_base 1939: mod_base = OTHER; note = N1-methylpseudouracil
  modified_base 1940: mod_base = OTHER; note = N1-methylpseudouracil
  modified_base 1942: mod_base = OTHER; note = N1-methylpseudouracil
  modified_base 1960: mod_base = OTHER; note = N1-methylpseudouracil
  modified_base 1964: mod_base = OTHER; note = N1-methylpseudouracil
  modified_base 1965: mod_base = OTHER; note = N1-methylpseudouracil
  modified_base 1967: mod_base = OTHER; note = N1-methylpseudouracil
  modified_base 1979: mod_base = OTHER; note = N1-methylpseudouracil
  modified_base 1987: mod_base = OTHER; note = N1-methylpseudouracil
  modified_base 1988: mod_base = OTHER; note = N1-methylpseudouracil
  modified_base 1990: mod_base = OTHER; note = N1-methylpseudouracil
  modified_base 1994: mod_base = OTHER; note = N1-methylpseudouracil
  modified_base 2012: mod_base = OTHER; note = N1-methylpseudouracil
  modified_base 2017: mod_base = OTHER; note = N1-methylpseudouracil
  modified_base 2041: mod_base = OTHER; note = N1-methylpseudouracil
  modified_base 2042: mod_base = OTHER; note = N1-methylpseudouracil
  modified_base 2059: mod_base = OTHER; note = N1-methylpseudouracil
  modified_base 2060: mod_base = OTHER; note = N1-methylpseudouracil
  modified_base 2080: mod_base = OTHER; note = N1-methylpseudouracil
  modified_base 2084: mod_base = OTHER; note = N1-methylpseudouracil
  modified_base 2087: mod_base = OTHER; note = N1-methylpseudouracil
  modified_base 2096: mod_base = OTHER; note = N1-methylpseudouracil
  modified_base 2105: mod_base = OTHER; note = N1-methylpseudouracil
  modified_base 2113: mod_base = OTHER; note = N1-methylpseudouracil
  modified_base 2114: mod_base = OTHER; note = N1-methylpseudouracil
  modified_base 2120: mod_base = OTHER; note = N1-methylpseudouracil
  modified_base 2123: mod_base = OTHER; note = N1-methylpseudouracil
  modified_base 2136: mod_base = OTHER; note = N1-methylpseudouracil
  modified_base 2138: mod_base = OTHER; note = N1-methylpseudouracil
  modified_base 2144: mod_base = OTHER; note = N1-methylpseudouracil
  modified_base 2153: mod_base = OTHER; note = N1-methylpseudouracil
  modified_base 2177: mod_base = OTHER; note = N1-methylpseudouracil
  modified_base 2189: mod_base = OTHER; note = N1-methylpseudouracil
  modified_base 2191: mod_base = OTHER; note = N1-methylpseudouracil
  modified_base 2195: mod_base = OTHER; note = N1-methylpseudouracil
  modified_base 2198: mod_base = OTHER; note = N1-methylpseudouracil
  modified_base 2225: mod_base = OTHER; note = N1-methylpseudouracil
  modified_base 2228: mod_base = OTHER; note = N1-methylpseudouracil
  modified_base 2237: mod_base = OTHER; note = N1-methylpseudouracil
  modified_base 2239: mod_base = OTHER; note = N1-methylpseudouracil
  modified_base 2243: mod_base = OTHER; note = N1-methylpseudouracil
  modified_base 2246: mod_base = OTHER; note = N1-methylpseudouracil
  modified_base 2248: mod_base = OTHER; note = N1-methylpseudouracil
  modified_base 2253: mod_base = OTHER; note = N1-methylpseudouracil
  modified_base 2264: mod_base = OTHER; note = N1-methylpseudouracil
  modified_base 2288: mod_base = OTHER; note = N1-methylpseudouracil
  modified_base 2291: mod_base = OTHER; note = N1-methylpseudouracil
  modified_base 2297: mod_base = OTHER; note = N1-methylpseudouracil
  modified_base 2300: mod_base = OTHER; note = N1-methylpseudouracil
  modified_base 2312: mod_base = OTHER; note = N1-methylpseudouracil
  modified_base 2328: mod_base = OTHER; note = N1-methylpseudouracil
  modified_base 2330: mod_base = OTHER; note = N1-methylpseudouracil
  modified_base 2343: mod_base = OTHER; note = N1-methylpseudouracil
  modified_base 2363: mod_base = OTHER; note = N1-methylpseudouracil
  modified_base 2369: mod_base = OTHER; note = N1-methylpseudouracil
  modified_base 2373: mod_base = OTHER; note = N1-methylpseudouracil
  modified_base 2387: mod_base = OTHER; note = N1-methylpseudouracil
  modified_base 2396: mod_base = OTHER; note = N1-methylpseudouracil
  modified_base 2402: mod_base = OTHER; note = N1-methylpseudouracil
  modified_base 2404: mod_base = OTHER; note = N1-methylpseudouracil
  modified_base 2417: mod_base = OTHER; note = N1-methylpseudouracil
  modified_base 2435: mod_base = OTHER; note = N1-methylpseudouracil
  modified_base 2441: mod_base = OTHER; note = N1-methylpseudouracil
  modified_base 2453: mod_base = OTHER; note = N1-methylpseudouracil
  modified_base 2468: mod_base = OTHER; note = N1-methylpseudouracil
  modified_base 2476: mod_base = OTHER; note = N1-methylpseudouracil
  modified_base 2479: mod_base = OTHER; note = N1-methylpseudouracil
  modified_base 2480: mod_base = OTHER; note = N1-methylpseudouracil
  modified_base 2482: mod_base = OTHER; note = N1-methylpseudouracil
  modified_base 2483: mod_base = OTHER; note = N1-methylpseudouracil
  modified_base 2492: mod_base = OTHER; note = N1-methylpseudouracil
  modified_base 2497: mod_base = OTHER; note = N1-methylpseudouracil
  modified_base 2501: mod_base = OTHER; note = N1-methylpseudouracil
  modified_base 2510: mod_base = OTHER; note = N1-methylpseudouracil
  modified_base 2518: mod_base = OTHER; note = N1-methylpseudouracil
  modified_base 2527: mod_base = OTHER; note = N1-methylpseudouracil
  modified_base 2531: mod_base = OTHER; note = N1-methylpseudouracil
  modified_base 2536: mod_base = OTHER; note = N1-methylpseudouracil
  modified_base 2540: mod_base = OTHER; note = N1-methylpseudouracil
  modified_base 2546: mod_base = OTHER; note = N1-methylpseudouracil
  modified_base 2558: mod_base = OTHER; note = N1-methylpseudouracil
  modified_base 2561: mod_base = OTHER; note = N1-methylpseudouracil
  modified_base 2563: mod_base = OTHER; note = N1-methylpseudouracil
  modified_base 2564: mod_base = OTHER; note = N1-methylpseudouracil
  modified_base 2567: mod_base = OTHER; note = N1-methylpseudouracil
  modified_base 2570: mod_base = OTHER; note = N1-methylpseudouracil
  modified_base 2573: mod_base = OTHER; note = N1-methylpseudouracil
  modified_base 2575: mod_base = OTHER; note = N1-methylpseudouracil
  modified_base 2578: mod_base = OTHER; note = N1-methylpseudouracil
  modified_base 2582: mod_base = OTHER; note = N1-methylpseudouracil
  modified_base 2585: mod_base = OTHER; note = N1-methylpseudouracil
  modified_base 2588: mod_base = OTHER; note = N1-methylpseudouracil
  modified_base 2590: mod_base = OTHER; note = N1-methylpseudouracil
  modified_base 2591: mod_base = OTHER; note = N1-methylpseudouracil
  modified_base 2593: mod_base = OTHER; note = N1-methylpseudouracil
  modified_base 2594: mod_base = OTHER; note = N1-methylpseudouracil
  modified_base 2603: mod_base = OTHER; note = N1-methylpseudouracil
  modified_base 2611: mod_base = OTHER; note = N1-methylpseudouracil
  modified_base 2615: mod_base = OTHER; note = N1-methylpseudouracil
  modified_base 2618: mod_base = OTHER; note = N1-methylpseudouracil
  modified_base 2621: mod_base = OTHER; note = N1-methylpseudouracil
  modified_base 2624: mod_base = OTHER; note = N1-methylpseudouracil
  modified_base 2626: mod_base = OTHER; note = N1-methylpseudouracil
  modified_base 2630: mod_base = OTHER; note = N1-methylpseudouracil
  modified_base 2633: mod_base = OTHER; note = N1-methylpseudouracil
  modified_base 2640: mod_base = OTHER; note = N1-methylpseudouracil
  modified_base 2648: mod_base = OTHER; note = N1-methylpseudouracil
  modified_base 2665: mod_base = OTHER; note = N1-methylpseudouracil
  modified_base 2689: mod_base = OTHER; note = N1-methylpseudouracil
  modified_base 2696: mod_base = OTHER; note = N1-methylpseudouracil
  modified_base 2699: mod_base = OTHER; note = N1-methylpseudouracil
  modified_base 2702: mod_base = OTHER; note = N1-methylpseudouracil
  modified_base 2707: mod_base = OTHER; note = N1-methylpseudouracil
  modified_base 2719: mod_base = OTHER; note = N1-methylpseudouracil
  modified_base 2722: mod_base = OTHER; note = N1-methylpseudouracil
  modified_base 2726: mod_base = OTHER; note = N1-methylpseudouracil
  modified_base 2728: mod_base = OTHER; note = N1-methylpseudouracil
  modified_base 2729: mod_base = OTHER; note = N1-methylpseudouracil
  modified_base 2731: mod_base = OTHER; note = N1-methylpseudouracil
  modified_base 2735: mod_base = OTHER; note = N1-methylpseudouracil
  modified_base 2737: mod_base = OTHER; note = N1-methylpseudouracil
  modified_base 2741: mod_base = OTHER; note = N1-methylpseudouracil
  modified_base 2747: mod_base = OTHER; note = N1-methylpseudouracil
  modified_base 2759: mod_base = OTHER; note = N1-methylpseudouracil
  modified_base 2762: mod_base = OTHER; note = N1-methylpseudouracil
  modified_base 2768: mod_base = OTHER; note = N1-methylpseudouracil
  modified_base 2773: mod_base = OTHER; note = N1-methylpseudouracil
  modified_base 2774: mod_base = OTHER; note = N1-methylpseudouracil
  modified_base 2776: mod_base = OTHER; note = N1-methylpseudouracil
  modified_base 2777: mod_base = OTHER; note = N1-methylpseudouracil
  modified_base 2786: mod_base = OTHER; note = N1-methylpseudouracil
  modified_base 2790: mod_base = OTHER; note = N1-methylpseudouracil
  modified_base 2792: mod_base = OTHER; note = N1-methylpseudouracil
  modified_base 2795: mod_base = OTHER; note = N1-methylpseudouracil
  modified_base 2804: mod_base = OTHER; note = N1-methylpseudouracil
  modified_base 2807: mod_base = OTHER; note = N1-methylpseudouracil
  modified_base 2813: mod_base = OTHER; note = N1-methylpseudouracil
  modified_base 2822: mod_base = OTHER; note = N1-methylpseudouracil
  modified_base 2825: mod_base = OTHER; note = N1-methylpseudouracil
  modified_base 2837: mod_base = OTHER; note = N1-methylpseudouracil
  modified_base 2840: mod_base = OTHER; note = N1-methylpseudouracil
  modified_base 2849: mod_base = OTHER; note = N1-methylpseudouracil
  modified_base 2852: mod_base = OTHER; note = N1-methylpseudouracil
  modified_base 2859: mod_base = OTHER; note = N1-methylpseudouracil
  modified_base 2864: mod_base = OTHER; note = N1-methylpseudouracil
  modified_base 2866: mod_base = OTHER; note = N1-methylpseudouracil
  modified_base 2873: mod_base = OTHER; note = N1-methylpseudouracil
  modified_base 2882: mod_base = OTHER; note = N1-methylpseudouracil
  modified_base 2897: mod_base = OTHER; note = N1-methylpseudouracil
  modified_base 2900: mod_base = OTHER; note = N1-methylpseudouracil
  modified_base 2908: mod_base = OTHER; note = N1-methylpseudouracil
  modified_base 2909: mod_base = OTHER; note = N1-methylpseudouracil
  modified_base 2921: mod_base = OTHER; note = N1-methylpseudouracil
  modified_base 2927: mod_base = OTHER; note = N1-methylpseudouracil
  modified_base 2928: mod_base = OTHER; note = N1-methylpseudouracil
  modified_base 2930: mod_base = OTHER; note = N1-methylpseudouracil
  modified_base 2937: mod_base = OTHER; note = N1-methylpseudouracil
  modified_base 2939: mod_base = OTHER; note = N1-methylpseudouracil
  modified_base 2942: mod_base = OTHER; note = N1-methylpseudouracil
  modified_base 2948: mod_base = OTHER; note = N1-methylpseudouracil
  modified_base 2954: mod_base = OTHER; note = N1-methylpseudouracil
  modified_base 2956: mod_base = OTHER; note = N1-methylpseudouracil
  modified_base 2957: mod_base = OTHER; note = N1-methylpseudouracil
  modified_base 2962: mod_base = OTHER; note = N1-methylpseudouracil
  modified_base 2963: mod_base = OTHER; note = N1-methylpseudouracil
  modified_base 2966: mod_base = OTHER; note = N1-methylpseudouracil
  modified_base 2972: mod_base = OTHER; note = N1-methylpseudouracil
  modified_base 2975: mod_base = OTHER; note = N1-methylpseudouracil
  modified_base 2978: mod_base = OTHER; note = N1-methylpseudouracil
  modified_base 2981: mod_base = OTHER; note = N1-methylpseudouracil
  modified_base 2984: mod_base = OTHER; note = N1-methylpseudouracil
  modified_base 2987: mod_base = OTHER; note = N1-methylpseudouracil
  modified_base 2996: mod_base = OTHER; note = N1-methylpseudouracil
  modified_base 3002: mod_base = OTHER; note = N1-methylpseudouracil
  modified_base 3005: mod_base = OTHER; note = N1-methylpseudouracil
  modified_base 3011: mod_base = OTHER; note = N1-methylpseudouracil
  modified_base 3014: mod_base = OTHER; note = N1-methylpseudouracil
  modified_base 3022: mod_base = OTHER; note = N1-methylpseudouracil
  modified_base 3026: mod_base = OTHER; note = N1-methylpseudouracil
  modified_base 3028: mod_base = OTHER; note = N1-methylpseudouracil
  modified_base 3029: mod_base = OTHER; note = N1-methylpseudouracil
  modified_base 3032: mod_base = OTHER; note = N1-methylpseudouracil
  modified_base 3041: mod_base = OTHER; note = N1-methylpseudouracil
  modified_base 3047: mod_base = OTHER; note = N1-methylpseudouracil
  modified_base 3050: mod_base = OTHER; note = N1-methylpseudouracil
  modified_base 3053: mod_base = OTHER; note = N1-methylpseudouracil
  modified_base 3058: mod_base = OTHER; note = N1-methylpseudouracil
  modified_base 3059: mod_base = OTHER; note = N1-methylpseudouracil
  modified_base 3062: mod_base = OTHER; note = N1-methylpseudouracil
  modified_base 3065: mod_base = OTHER; note = N1-methylpseudouracil
  modified_base 3068: mod_base = OTHER; note = N1-methylpseudouracil
  modified_base 3076: mod_base = OTHER; note = N1-methylpseudouracil
  modified_base 3079: mod_base = OTHER; note = N1-methylpseudouracil
  modified_base 3080: mod_base = OTHER; note = N1-methylpseudouracil
  modified_base 3083: mod_base = OTHER; note = N1-methylpseudouracil
  modified_base 3091: mod_base = OTHER; note = N1-methylpseudouracil
  modified_base 3101: mod_base = OTHER; note = N1-methylpseudouracil
  modified_base 3110: mod_base = OTHER; note = N1-methylpseudouracil
  modified_base 3134: mod_base = OTHER; note = N1-methylpseudouracil
  modified_base 3136: mod_base = OTHER; note = N1-methylpseudouracil
  modified_base 3137: mod_base = OTHER; note = N1-methylpseudouracil
  modified_base 3146: mod_base = OTHER; note = N1-methylpseudouracil
  modified_base 3149: mod_base = OTHER; note = N1-methylpseudouracil
  modified_base 3153: mod_base = OTHER; note = N1-methylpseudouracil
  modified_base 3158: mod_base = OTHER; note = N1-methylpseudouracil
  modified_base 3167: mod_base = OTHER; note = N1-methylpseudouracil
  modified_base 3169: mod_base = OTHER; note = N1-methylpseudouracil
  modified_base 3176: mod_base = OTHER; note = N1-methylpseudouracil
  modified_base 3184: mod_base = OTHER; note = N1-methylpseudouracil
  modified_base 3185: mod_base = OTHER; note = N1-methylpseudouracil
  modified_base 3199: mod_base = OTHER; note = N1-methylpseudouracil
  modified_base 3202: mod_base = OTHER; note = N1-methylpseudouracil
  modified_base 3203: mod_base = OTHER; note = N1-methylpseudouracil
  modified_base 3212: mod_base = OTHER; note = N1-methylpseudouracil
  modified_base 3214: mod_base = OTHER; note = N1-methylpseudouracil
  modified_base 3215: mod_base = OTHER; note = N1-methylpseudouracil
  modified_base 3225: mod_base = OTHER; note = N1-methylpseudouracil
  modified_base 3227: mod_base = OTHER; note = N1-methylpseudouracil
  modified_base 3233: mod_base = OTHER; note = N1-methylpseudouracil
  modified_base 3247: mod_base = OTHER; note = N1-methylpseudouracil
  modified_base 3250: mod_base = OTHER; note = N1-methylpseudouracil
  modified_base 3251: mod_base = OTHER; note = N1-methylpseudouracil
  modified_base 3254: mod_base = OTHER; note = N1-methylpseudouracil
  modified_base 3256: mod_base = OTHER; note = N1-methylpseudouracil
  modified_base 3260: mod_base = OTHER; note = N1-methylpseudouracil
  modified_base 3269: mod_base = OTHER; note = N1-methylpseudouracil
  modified_base 3274: mod_base = OTHER; note = N1-methylpseudouracil
  modified_base 3277: mod_base = OTHER; note = N1-methylpseudouracil
  modified_base 3278: mod_base = OTHER; note = N1-methylpseudouracil
  modified_base 3284: mod_base = OTHER; note = N1-methylpseudouracil
  modified_base 3290: mod_base = OTHER; note = N1-methylpseudouracil
  modified_base 3296: mod_base = OTHER; note = N1-methylpseudouracil
  modified_base 3299: mod_base = OTHER; note = N1-methylpseudouracil
  modified_base 3301: mod_base = OTHER; note = N1-methylpseudouracil
  modified_base 3302: mod_base = OTHER; note = N1-methylpseudouracil
  modified_base 3305: mod_base = OTHER; note = N1-methylpseudouracil
  modified_base 3308: mod_base = OTHER; note = N1-methylpseudouracil
  modified_base 3310: mod_base = OTHER; note = N1-methylpseudouracil
  modified_base 3311: mod_base = OTHER; note = N1-methylpseudouracil
  modified_base 3313: mod_base = OTHER; note = N1-methylpseudouracil
  modified_base 3314: mod_base = OTHER; note = N1-methylpseudouracil
  modified_base 3317: mod_base = OTHER; note = N1-methylpseudouracil
  modified_base 3323: mod_base = OTHER; note = N1-methylpseudouracil
  modified_base 3328: mod_base = OTHER; note = N1-methylpseudouracil
  modified_base 3329: mod_base = OTHER; note = N1-methylpseudouracil
  modified_base 3332: mod_base = OTHER; note = N1-methylpseudouracil
  modified_base 3334: mod_base = OTHER; note = N1-methylpseudouracil
  modified_base 3338: mod_base = OTHER; note = N1-methylpseudouracil
  modified_base 3341: mod_base = OTHER; note = N1-methylpseudouracil
  modified_base 3368: mod_base = OTHER; note = N1-methylpseudouracil
  modified_base 3374: mod_base = OTHER; note = N1-methylpseudouracil
  modified_base 3377: mod_base = OTHER; note = N1-methylpseudouracil
  modified_base 3380: mod_base = OTHER; note = N1-methylpseudouracil
  modified_base 3386: mod_base = OTHER; note = N1-methylpseudouracil
  modified_base 3392: mod_base = OTHER; note = N1-methylpseudouracil
  modified_base 3396: mod_base = OTHER; note = N1-methylpseudouracil
  modified_base 3398: mod_base = OTHER; note = N1-methylpseudouracil
  modified_base 3401: mod_base = OTHER; note = N1-methylpseudouracil
  modified_base 3410: mod_base = OTHER; note = N1-methylpseudouracil
  modified_base 3415: mod_base = OTHER; note = N1-methylpseudouracil
  modified_base 3422: mod_base = OTHER; note = N1-methylpseudouracil
  modified_base 3434: mod_base = OTHER; note = N1-methylpseudouracil
  modified_base 3440: mod_base = OTHER; note = N1-methylpseudouracil
  modified_base 3449: mod_base = OTHER; note = N1-methylpseudouracil
  modified_base 3452: mod_base = OTHER; note = N1-methylpseudouracil
  modified_base 3457: mod_base = OTHER; note = N1-methylpseudouracil
  modified_base 3461: mod_base = OTHER; note = N1-methylpseudouracil
  modified_base 3463: mod_base = OTHER; note = N1-methylpseudouracil
  modified_base 3470: mod_base = OTHER; note = N1-methylpseudouracil
  modified_base 3472: mod_base = OTHER; note = N1-methylpseudouracil
  modified_base 3473: mod_base = OTHER; note = N1-methylpseudouracil
  modified_base 3478: mod_base = OTHER; note = N1-methylpseudouracil
  modified_base 3479: mod_base = OTHER; note = N1-methylpseudouracil
  modified_base 3482: mod_base = OTHER; note = N1-methylpseudouracil
  modified_base 3488: mod_base = OTHER; note = N1-methylpseudouracil
  modified_base 3526: mod_base = OTHER; note = N1-methylpseudouracil
  modified_base 3542: mod_base = OTHER; note = N1-methylpseudouracil
  modified_base 3551: mod_base = OTHER; note = N1-methylpseudouracil
  modified_base 3554: mod_base = OTHER; note = N1-methylpseudouracil
  modified_base 3557: mod_base = OTHER; note = N1-methylpseudouracil
  modified_base 3558: mod_base = OTHER; note = N1-methylpseudouracil
  modified_base 3560: mod_base = OTHER; note = N1-methylpseudouracil
  modified_base 3575: mod_base = OTHER; note = N1-methylpseudouracil
  modified_base 3590: mod_base = OTHER; note = N1-methylpseudouracil
  modified_base 3592: mod_base = OTHER; note = N1-methylpseudouracil
  modified_base 3597: mod_base = OTHER; note = N1-methylpseudouracil
  modified_base 3598: mod_base = OTHER; note = N1-methylpseudouracil
  modified_base 3611: mod_base = OTHER; note = N1-methylpseudouracil
  modified_base 3617: mod_base = OTHER; note = N1-methylpseudouracil
  modified_base 3626: mod_base = OTHER; note = N1-methylpseudouracil
  modified_base 3637: mod_base = OTHER; note = N1-methylpseudouracil
  modified_base 3659: mod_base = OTHER; note = N1-methylpseudouracil
  modified_base 3662: mod_base = OTHER; note = N1-methylpseudouracil
  modified_base 3671: mod_base = OTHER; note = N1-methylpseudouracil
  modified_base 3676: mod_base = OTHER; note = N1-methylpseudouracil
  modified_base 3677: mod_base = OTHER; note = N1-methylpseudouracil
  modified_base 3679: mod_base = OTHER; note = N1-methylpseudouracil
  modified_base 3683: mod_base = OTHER; note = N1-methylpseudouracil
  modified_base 3684: mod_base = OTHER; note = N1-methylpseudouracil
  modified_base 3690: mod_base = OTHER; note = N1-methylpseudouracil
  modified_base 3701: mod_base = OTHER; note = N1-methylpseudouracil
  modified_base 3707: mod_base = OTHER; note = N1-methylpseudouracil
  modified_base 3709: mod_base = OTHER; note = N1-methylpseudouracil
  modified_base 3710: mod_base = OTHER; note = N1-methylpseudouracil
  modified_base 3726: mod_base = OTHER; note = N1-methylpseudouracil
  modified_base 3740: mod_base = OTHER; note = N1-methylpseudouracil
  modified_base 3743: mod_base = OTHER; note = N1-methylpseudouracil
  modified_base 3745: mod_base = OTHER; note = N1-methylpseudouracil
  modified_base 3751: mod_base = OTHER; note = N1-methylpseudouracil
  modified_base 3752: mod_base = OTHER; note = N1-methylpseudouracil
  modified_base 3755: mod_base = OTHER; note = N1-methylpseudouracil
  modified_base 3761: mod_base = OTHER; note = N1-methylpseudouracil
  modified_base 3764: mod_base = OTHER; note = N1-methylpseudouracil
  modified_base 3782: mod_base = OTHER; note = N1-methylpseudouracil
  modified_base 3788: mod_base = OTHER; note = N1-methylpseudouracil
  modified_base 3797: mod_base = OTHER; note = N1-methylpseudouracil
  modified_base 3802: mod_base = OTHER; note = N1-methylpseudouracil
  modified_base 3812: mod_base = OTHER; note = N1-methylpseudouracil
  modified_base 3818: mod_base = OTHER; note = N1-methylpseudouracil
  modified_base 3826: mod_base = OTHER; note = N1-methylpseudouracil
  modified_base 3838: mod_base = OTHER; note = N1-methylpseudouracil
  modified_base 3839: mod_base = OTHER; note = N1-methylpseudouracil
  modified_base 3845: mod_base = OTHER; note = N1-methylpseudouracil
  modified_base 3848: mod_base = OTHER; note = N1-methylpseudouracil
  modified_base 3860: mod_base = OTHER; note = N1-methylpseudouracil
  modified_base 3862: mod_base = OTHER; note = N1-methylpseudouracil
  modified_base 3863: mod_base = OTHER; note = N1-methylpseudouracil
  modified_base 3864: mod_base = OTHER; note = N1-methylpseudouracil
  modified_base 3866: mod_base = OTHER; note = N1-methylpseudouracil
  modified_base 3867: mod_base = OTHER; note = N1-methylpseudouracil
  modified_base 3868: mod_base = OTHER; note = N1-methylpseudouracil
  modified_base 3869: mod_base = OTHER; note = N1-methylpseudouracil
  modified_base 3871: mod_base = OTHER; note = N1-methylpseudouracil
  modified_base 3873: mod_base = OTHER; note = N1-methylpseudouracil
  modified_base 3880: mod_base = OTHER; note = N1-methylpseudouracil
  modified_base 3881: mod_base = OTHER; note = N1-methylpseudouracil
  modified_base 3882: mod_base = OTHER; note = N1-methylpseudouracil
  modified_base 3893: mod_base = OTHER; note = N1-methylpseudouracil
  modified_base 3901: mod_base = OTHER; note = N1-methylpseudouracil
  modified_base 3910: mod_base = OTHER; note = N1-methylpseudouracil
  modified_base 3913: mod_base = OTHER; note = N1-methylpseudouracil
  modified_base 3926: mod_base = OTHER; note = N1-methylpseudouracil
  modified_base 3928: mod_base = OTHER; note = N1-methylpseudouracil
  modified_base 3935: mod_base = OTHER; note = N1-methylpseudouracil
  modified_base 3947: mod_base = OTHER; note = N1-methylpseudouracil
  modified_base 3953: mod_base = OTHER; note = N1-methylpseudouracil
  modified_base 3958: mod_base = OTHER; note = N1-methylpseudouracil
  modified_base 3962: mod_base = OTHER; note = N1-methylpseudouracil
  modified_base 3965: mod_base = OTHER; note = N1-methylpseudouracil
  modified_base 3973: mod_base = OTHER; note = N1-methylpseudouracil
  modified_base 3974: mod_base = OTHER; note = N1-methylpseudouracil
  modified_base 3986: mod_base = OTHER; note = N1-methylpseudouracil
  modified_base 3991: mod_base = OTHER; note = N1-methylpseudouracil
  modified_base 3992: mod_base = OTHER; note = N1-methylpseudouracil
  modified_base 3995: mod_base = OTHER; note = N1-methylpseudouracil
  modified_base 3998: mod_base = OTHER; note = N1-methylpseudouracil
  modified_base 4001: mod_base = OTHER; note = N1-methylpseudouracil
  modified_base 4012: mod_base = OTHER; note = N1-methylpseudouracil
  modified_base 4016: mod_base = OTHER; note = N1-methylpseudouracil
  modified_base 4019: mod_base = OTHER; note = N1-methylpseudouracil
  modified_base 4040: mod_base = OTHER; note = N1-methylpseudouracil
  modified_base 4043: mod_base = OTHER; note = N1-methylpseudouracil
  modified_base 4045: mod_base = OTHER; note = N1-methylpseudouracil
  modified_base 4049: mod_base = OTHER; note = N1-methylpseudouracil
  modified_base 4061: mod_base = OTHER; note = N1-methylpseudouracil
  modified_base 4064: mod_base = OTHER; note = N1-methylpseudouracil
  modified_base 4079: mod_base = OTHER; note = N1-methylpseudouracil
  modified_base 4082: mod_base = OTHER; note = N1-methylpseudouracil
  modified_base 4085: mod_base = OTHER; note = N1-methylpseudouracil
  modified_base 4088: mod_base = OTHER; note = N1-methylpseudouracil
  modified_base 4099: mod_base = OTHER; note = N1-methylpseudouracil
  modified_base 4109: mod_base = OTHER; note = N1-methylpseudouracil
  modified_base 4113: mod_base = OTHER; note = N1-methylpseudouracil
  modified_base 4118: mod_base = OTHER; note = N1-methylpseudouracil
  modified_base 4123: mod_base = OTHER; note = N1-methylpseudouracil
  modified_base 4130: mod_base = OTHER; note = N1-methylpseudouracil
  modified_base 4133: mod_base = OTHER; note = N1-methylpseudouracil
  modified_base 4145: mod_base = OTHER; note = N1-methylpseudouracil
  modified_base 4156: mod_base = OTHER; note = N1-methylpseudouracil
  modified_base 4157: mod_base = OTHER; note = N1-methylpseudouracil
  modified_base 4165: mod_base = OTHER; note = N1-methylpseudouracil
  modified_base 4172: mod_base = OTHER; note = N1-methylpseudouracil
  modified_base 4175: mod_base = OTHER; note = N1-methylpseudouracil
  modified_base 4178: mod_base = OTHER; note = N1-methylpseudouracil
  modified_base 4180: mod_base = OTHER; note = N1-methylpseudouracil
  modified_base 4193: mod_base = OTHER; note = N1-methylpseudouracil
  modified_base 4200: mod_base = OTHER; note = N1-methylpseudouracil
  modified_base 4202: mod_base = OTHER; note = N1-methylpseudouracil
  modified_base 4205: mod_base = OTHER; note = N1-methylpseudouracil
  modified_base 4210: mod_base = OTHER; note = N1-methylpseudouracil
  modified_base 4219: mod_base = OTHER; note = N1-methylpseudouracil
  modified_base 4220: mod_base = OTHER; note = N1-methylpseudouracil
  modified_base 4223: mod_base = OTHER; note = N1-methylpseudouracil
  modified_base 4226: mod_base = OTHER; note = N1-methylpseudouracil
  modified_base 4229: mod_base = OTHER; note = N1-methylpseudouracil
  modified_base 4244: mod_base = OTHER; note = N1-methylpseudouracil
  modified_base 4252: mod_base = OTHER; note = N1-methylpseudouracil
  modified_base 4258: mod_base = OTHER; note = N1-methylpseudouracil
  modified_base 4262: mod_base = OTHER; note = N1-methylpseudouracil
  modified_base 4271: mod_base = OTHER; note = N1-methylpseudouracil
  modified_base 4274: mod_base = OTHER; note = N1-methylpseudouracil
  modified_base 4289: mod_base = OTHER; note = N1-methylpseudouracil
  modified_base 4291: mod_base = OTHER; note = N1-methylpseudouracil
  modified_base 4292: mod_base = OTHER; note = N1-methylpseudouracil
  modified_base 4302: mod_base = OTHER; note = N1-methylpseudouracil
  modified_base 4304: mod_base = OTHER; note = N1-methylpseudouracil
  modified_base 4306: mod_base = OTHER; note = N1-methylpseudouracil
  modified_base 4308: mod_base = OTHER; note = N1-methylpseudouracil
  modified_base 4317: mod_base = OTHER; note = N1-methylpseudouracil
  modified_base 4322: mod_base = OTHER; note = N1-methylpseudouracil
  modified_base 4328: mod_base = OTHER; note = N1-methylpseudouracil
  modified_base 4330: mod_base = OTHER; note = N1-methylpseudouracil
  modified_base 4331: mod_base = OTHER; note = N1-methylpseudouracil
  modified_base 4335: mod_base = OTHER; note = N1-methylpseudouracil
  modified_base 4354: mod_base = OTHER; note = N1-methylpseudouracil
  modified_base 4360: mod_base = OTHER; note = N1-methylpseudouracil
  modified_base 4362: mod_base = OTHER; note = N1-methylpseudouracil
  modified_base 4373: mod_base = OTHER; note = N1-methylpseudouracil
  modified_base 4382: mod_base = OTHER; note = N1-methylpseudouracil
  modified_base 4406: mod_base = OTHER; note = N1-methylpseudouracil
  modified_base 4413: mod_base = OTHER; note = N1-methylpseudouracil
  modified_base 4421: mod_base = OTHER; note = N1-methylpseudouracil
  modified_base 4423: mod_base = OTHER; note = N1-methylpseudouracil
  modified_base 4429: mod_base = OTHER; note = N1-methylpseudouracil
  modified_base 4441: mod_base = OTHER; note = N1-methylpseudouracil
  modified_base 4450: mod_base = OTHER; note = N1-methylpseudouracil
  modified_base 4451: mod_base = OTHER; note = N1-methylpseudouracil
  modified_base 4453: mod_base = OTHER; note = N1-methylpseudouracil
  modified_base 4457: mod_base = OTHER; note = N1-methylpseudouracil
  modified_base 4458: mod_base = OTHER; note = N1-methylpseudouracil
  modified_base 4461: mod_base = OTHER; note = N1-methylpseudouracil
  modified_base 4464: mod_base = OTHER; note = N1-methylpseudouracil
  modified_base 4469: mod_base = OTHER; note = N1-methylpseudouracil
  modified_base 4472: mod_base = OTHER; note = N1-methylpseudouracil
  modified_base 4475: mod_base = OTHER; note = N1-methylpseudouracil
  modified_base 4486: mod_base = OTHER; note = N1-methylpseudouracil
  modified_base 4494: mod_base = OTHER; note = N1-methylpseudouracil
  modified_base 4502: mod_base = OTHER; note = N1-methylpseudouracil
  modified_base 4505: mod_base = OTHER; note = N1-methylpseudouracil
  modified_base 4507: mod_base = OTHER; note = N1-methylpseudouracil
  modified_base 4508: mod_base = OTHER; note = N1-methylpseudouracil
  modified_base 4509: mod_base = OTHER; note = N1-methylpseudouracil
  modified_base 4513: mod_base = OTHER; note = N1-methylpseudouracil
  modified_base 4518: mod_base = OTHER; note = N1-methylpseudouracil
  modified_base 4520: mod_base = OTHER; note = N1-methylpseudouracil
  modified_base 4524: mod_base = OTHER; note = N1-methylpseudouracil
ggaggaaatcgcaaaatttgctcttcgcgttagatttcttttagttttctcgcaactagcaagctttttgttctcgccatgcagcggagccctctggagaaggccagcgtggtgagcaagctgttcttcagctggaccaggcccatcctgcgaaagggctacagacagaggctggagctgtccgacatctaccagattccatccgtggacagcgccgacaatctgagcgagaagctggagagggagtgggaccgcgagctggccagcaagaagaaccctaagctgatcaacgccctgcgccgctgcttcttctggaggttcatgttctacggcatcttcctgtacctgggcgaggtgaccaaggccgtccagcctctgctgctgggccgcatcatcgccagctacgatcccgacaacaaggaggaacgctccatcgccatctacctgggcatcggcctgtgtctgctgttcatcgtgcggaccctgctgctgcaccccgccatcttcggcctgcatcacatcggcatgcagatgaggatcgccatgttctccctgatctacaagaagaccctgaagctgtccagccgcgtgctggataagatcagcatcgggcagctggtgagcctgctgagcaacaacctgaacaagttcgacgaggggttggcgctggcccacttcgtgtggattgccccgctgcaggtggctctgctgatggggctgatctgggagctgctgcaggcctctgccttctgcgggctggggtttctgatcgtgctggccctgttccaagctggcctgggccgcatgatgatgaagtaccgcgatcagagggccggcaagatcagcgagcgcctggtgatcactagcgagatgatagagaacatccagagcgtgaaggcttactgttgggaggaggccatggagaagatgatcgagaacctgaggcagaccgagctgaagctgactagaaaggcagcctacgtgaggtatttcaactccagcgccttcttcttcagcggcttcttcgtggtgttcctgagcgtgctgccctacgccctgatcaagggcatcatcctgaggaagatcttcaccaccattagcttctgcatcgtgctgcgcatggccgtgaccaggcagttcccttgggccgtgcagacttggtacgacagcctgggagccatcaacaagatccaggactttctgcagaagcaggaatataagaccctggagtacaacctgaccaccaccgaggtggtgatggagaacgtgaccgccttctgggaggagctgggcacccctgtgctgaaggacatcaacttcaagatcgaaagaggccaactgctggccgtggccggatctaccggcgccggcaagaccagcctgctgatgatgatcatgggcgagctggagcccagcgagggcaagatcaagcacagcggccggatctccttctgcccacagttctcctggatcatgcccggcaccatcaaggagaacatcatcttcggcgtgagctacgacgagtacaggtaccggagcgtgatcaaggcctgccagctggaggaggacatctccaaatttcccgagaaggacaacaccgtgctgggcgaaggcgggatcaccctgtccggtggccagcgtgcacgcatctccctggcccgggctgtgtacaaggacgccgacctgtacctgctggacagcccttttggctacctggacgtgctgaccgagaaggagatcttcgagtcctgcgtgtgtaagctgatggccaacaagaccagaatcctggtgaccagcaagatggagcatctgaagaaggccgacaagatcctgatcctgcacgaggggtccagctacttctacggcaccttcagcgagctgcagaacctgcagcccgacttcagctccaagctgatgggctgcgatagcttcgaccagttctccgccgagagaaggaactccattctgaccgagaccctgcaccgattctccctggagggagacgccccagtgagctggaccgagaccaagaagcagagcttcaagcagaccggcgagttcggagagaagcgcaagaactccatcctcaaccccatcaacagcatccggaagttcagcatcgtgcagaagacccctctgcagatgaacgggatcgaggaggacagcgacgagcccctggaacggcgactgtccctcgtgcccgacagcgagcagggcgaggccatcctgccccggatctccgtgatctccactgggcccaccctgcaagcccgacggcggcaaagcgtgctgaacctgatgacccacagcgtgaaccagggccagaatatccaccgcaagactacagccagcacccgcaaggtgagcctggctccccaggccaacctgaccgagctggacatctacagcaggaggctgagccaggagacaggcctggagatcagcgaggagatcaacgaggaggacctgaaggagtgcttcttcgacgacatggagtccatccccgccgtgaccacctggaacacctacctgagatacatcaccgtgcacaagagcctgatcttcgtgctgatctggtgcctggtgatcttcttggccgaggtagccgcctcactggtggtgctgtggctgctgggcaataccccactgcaggacaaggggaactccacccacagccggaacaacagctacgccgtgatcatcacctccaccagcagctactacgtgttctacatctacgtgggcgtggccgacacactgctggccatgggcttcttcagaggcctccctctggtgcacacactgatcaccgtgagcaagatcctgcaccacaagatgctgcacagcgtgctgcaggctcccatgtcaaccctgaacaccctgaaggccggcggcatcctgaacaggttcagcaaggacatcgccattctggacgatctgctgcccctgaccatcttcgacttcatccagctgctgctgatcgtgatcggggccatcgccgtggtggccgtgctgcagccctacatcttcgtggccacagtgcccgtgatcgtggccttcatcatgctgcgcgcctacttcctgcagacctcccagcagctgaagcagctggagagcgaaggccgcagccccatcttcacccacctggtgactagcctgaaggggctgtggaccctgcgcgccttcggcaggcagccctacttcgagaccctgttccacaaggctctgaacctgcacaccgccaactggttcctgtacctcagcaccctgcgctggttccagatgcggatcgagatgatcttcgtgatcttcttcatcgccgtgaccttcatctccatcctgaccaccggggaaggcgagggacgggtgggaatcatcctgaccctggccatgaatatcatgagcaccctgcagtgggccgtgaacagcagcatcgacgtggacagcctgatgcggtccgtgtcccgggtgttcaagttcatcgacatgcccaccgagggcaagcccaccaagagcaccaagccctacaagaacggccagctgagcaaggtgatgattatcgagaacagccacgtgaagaaggacgacatctggccttccggcggccagatgaccgtgaaggacctgaccgccaagtacaccgagggcggcaacgccatcctggagaacatcagcttctccattagccctggacagcgggtgggcctgttgggacggaccggcagtgggaagagcaccctgctgtccgccttcctgcggctgctgaacacggagggcgagatccagatcgacggggtgagctgggacagcatcaccctgcagcagtggcgaaaggccttcggcgtgatcccacagaaggtgtttattttctctggcacctttaggaagaacctggacccctacgagcagtggtccgaccaggagatctggaaggtggccgacgaggtgggcctgcggtcagtgatcgagcagttccccggcaagctggacttcgtgctggtggacggcggctgcgtgctgagccacggccacaagcagctgatgtgcctggcacgcagcgtgctgagcaaggccaagatcctgctgctggacgagccctccgcgcacctggatcccgtgacctaccagatcatcaggcggaccctgaagcaggccttcgccgactgcaccgtgatcctgtgcgagagcagaatcgaggctatgctggagtgccagcagttcctggtgatcgaggagaacaaggtgcggcagtacgactccatccagaagctgctgaacgagcgcagcctgttcagacaggctatctctcccagcgatcgcgtgaagctgttccctcacaggaacagcagcaagtgcaagtctaagccacagatcgccgccctgaaggaggagaccgaggaggaggtgcaggatacccgcctgtaaagctccccgggggcctccaccgcgttatccgttcctcgtaggctggtcctggggaacgggtcggcgggtacccccgtggtctttgaataaagtctgagtgggcggcaaaaaaaaaaaaaaaaaaaaaaaaaaaaaaaaaaaaaaaaaaaaaaaaaaaaaaaaaaaaaaaaaaaaaaaaaaaaaaaaaaaaaaaaaaaaaaaaaaaa

SEQ ID NO: 23 - DNA, 4763 bp, synthetic construct
  source 1..4763: mol_type = other DNA
  modified_base 1: mod_base = OTHER; note = 7-Methylguanosine with triphosphate linkage
  modified_base 2: mod_base = OTHER; note = 2'-O-methyl modified nucleotide
  modified_base 9: mod_base = OTHER; note = N1-methylpseudouracil
  modified_base 17: mod_base = OTHER; note = N1-methylpseudouracil
  modified_base 18: mod_base = OTHER; note = N1-methylpseudouracil
  modified_base 19: mod_base = OTHER; note = N1-methylpseudouracil
  modified_base 22: mod_base = OTHER; note = N1-methylpseudouracil
  modified_base 24: mod_base = OTHER; note = N1-methylpseudouracil
  modified_base 25: mod_base = OTHER; note = N1-methylpseudouracil
  modified_base 30: mod_base = OTHER; note = N1-methylpseudouracil
  modified_base 31: mod_base = OTHER; note = N1-methylpseudouracil
  modified_base 35: mod_base = OTHER; note = N1-methylpseudouracil
  modified_base 36: mod_base = OTHER; note = N1-methylpseudouracil
  modified_base 37: mod_base = OTHER; note = N1-methylpseudouracil
  modified_base 39: mod_base = OTHER; note = N1-methylpseudouracil
  modified_base 40: mod_base = OTHER; note = N1-methylpseudouracil
  modified_base 41: mod_base = OTHER; note = N1-methylpseudouracil
  modified_base 42: mod_base = OTHER; note = N1-methylpseudouracil
  modified_base 45: mod_base = OTHER; note = N1-methylpseudouracil
  modified_base 46: mod_base = OTHER; note = N1-methylpseudouracil
  modified_base 47: mod_base = OTHER; note = N1-methylpseudouracil
  modified_base 48: mod_base = OTHER; note = N1-methylpseudouracil
  modified_base 50: mod_base = OTHER; note = N1-methylpseudouracil
  modified_base 57: mod_base = OTHER; note = N1-methylpseudouracil
  modified_base 65: mod_base = OTHER; note = N1-methylpseudouracil
  modified_base 66: mod_base = OTHER; note = N1-methylpseudouracil
  modified_base 67: mod_base = OTHER; note = N1-methylpseudouracil
  modified_base 68: mod_base = OTHER; note = N1-methylpseudouracil
  modified_base 69: mod_base = OTHER; note = N1-methylpseudouracil
  modified_base 71: mod_base = OTHER; note = N1-methylpseudouracil
  modified_base 72: mod_base = OTHER; note = N1-methylpseudouracil
  modified_base 74: mod_base = OTHER; note = N1-methylpseudouracil
  modified_base 80: mod_base = OTHER; note = N1-methylpseudouracil
  modified_base 93: mod_base = OTHER; note = N1-methylpseudouracil
  modified_base 95: mod_base = OTHER; note = N1-methylpseudouracil
  modified_base 110: mod_base = OTHER; note = N1-methylpseudouracil
  modified_base 113: mod_base = OTHER; note = N1-methylpseudouracil
  modified_base 122: mod_base = OTHER; note = N1-methylpseudouracil
  modified_base 124: mod_base = OTHER; note = N1-methylpseudouracil
  modified_base 125: mod_base = OTHER; note = N1-methylpseudouracil
  modified_base 127: mod_base = OTHER; note = N1-methylpseudouracil
  modified_base 128: mod_base = OTHER; note = N1-methylpseudouracil
  modified_base 133: mod_base = OTHER; note = N1-methylpseudouracil
  modified_base 146: mod_base = OTHER; note = N1-methylpseudouracil
  modified_base 149: mod_base = OTHER; note = N1-methylpseudouracil
  modified_base 160: mod_base = OTHER; note = N1-methylpseudouracil
  modified_base 173: mod_base = OTHER; note = N1-methylpseudouracil
  modified_base 179: mod_base = OTHER; note = N1-methylpseudouracil
  modified_base 181: mod_base = OTHER; note = N1-methylpseudouracil
  modified_base 188: mod_base = OTHER; note = N1-methylpseudouracil
  modified_base 190: mod_base = OTHER; note = N1-methylpseudouracil
  modified_base 197: mod_base = OTHER; note = N1-methylpseudouracil
  modified_base 198: mod_base = OTHER; note = N1-methylpseudouracil
  modified_base 202: mod_base = OTHER; note = N1-methylpseudouracil
  modified_base 206: mod_base = OTHER; note = N1-methylpseudouracil
  modified_base 222: mod_base = OTHER; note = N1-methylpseudouracil
  modified_base 224: mod_base = OTHER; note = N1-methylpseudouracil
  modified_base 236: mod_base = OTHER; note = N1-methylpseudouracil
  modified_base 247: mod_base = OTHER; note = N1-methylpseudouracil
  modified_base 260: mod_base = OTHER; note = N1-methylpseudouracil
  modified_base 279: mod_base = OTHER; note = N1-methylpseudouracil
  modified_base 284: mod_base = OTHER; note = N1-methylpseudouracil
  modified_base 287: mod_base = OTHER; note = N1-methylpseudouracil
  modified_base 296: mod_base = OTHER; note = N1-methylpseudouracil
  modified_base 304: mod_base = OTHER; note = N1-methylpseudouracil
  modified_base 307: mod_base = OTHER; note = N1-methylpseudouracil
  modified_base 308: mod_base = OTHER; note = N1-methylpseudouracil
  modified_base 310: mod_base = OTHER; note = N1-methylpseudouracil
  modified_base 311: mod_base = OTHER; note = N1-methylpseudouracil
  modified_base 313: mod_base = OTHER; note = N1-methylpseudouracil
  modified_base 319: mod_base = OTHER; note = N1-methylpseudouracil
  modified_base 320: mod_base = OTHER; note = N1-methylpseudouracil
  modified_base 323: mod_base = OTHER; note = N1-methylpseudouracil
  modified_base 325: mod_base = OTHER; note = N1-methylpseudouracil
  modified_base 326: mod_base = OTHER; note = N1-methylpseudouracil
  modified_base 328: mod_base = OTHER; note = N1-methylpseudouracil
  modified_base 335: mod_base = OTHER; note = N1-methylpseudouracil
  modified_base 337: mod_base = OTHER; note = N1-methylpseudouracil
  modified_base 338: mod_base = OTHER; note = N1-methylpseudouracil
  modified_base 341: mod_base = OTHER; note = N1-methylpseudouracil
  modified_base 343: mod_base = OTHER; note = N1-methylpseudouracil
  modified_base 347: mod_base = OTHER; note = N1-methylpseudouracil
  modified_base 356: mod_base = OTHER; note = N1-methylpseudouracil
  modified_base 368: mod_base = OTHER; note = N1-methylpseudouracil
  modified_base 375: mod_base = OTHER; note = N1-methylpseudouracil
  modified_base 377: mod_base = OTHER; note = N1-methylpseudouracil
  modified_base 380: mod_base = OTHER; note = N1-methylpseudouracil
  modified_base 383: mod_base = OTHER; note = N1-methylpseudouracil
  modified_base 392: mod_base = OTHER; note = N1-methylpseudouracil
  modified_base 395: mod_base = OTHER; note = N1-methylpseudouracil
  modified_base 403: mod_base = OTHER; note = N1-methylpseudouracil
  modified_base 408: mod_base = OTHER; note = N1-methylpseudouracil
  modified_base 430: mod_base = OTHER; note = N1-methylpseudouracil
  modified_base 434: mod_base = OTHER; note = N1-methylpseudouracil
  modified_base 440: mod_base = OTHER; note = N1-methylpseudouracil
  modified_base 442: mod_base = OTHER; note = N1-methylpseudouracil
  modified_base 446: mod_base = OTHER; note = N1-methylpseudouracil
  modified_base 452: mod_base = OTHER; note = N1-methylpseudouracil
  modified_base 458: mod_base = OTHER; note = N1-methylpseudouracil
  modified_base 460: mod_base = OTHER; note = N1-methylpseudouracil
  modified_base 462: mod_base = OTHER; note = N1-methylpseudouracil
  modified_base 464: mod_base = OTHER; note = N1-methylpseudouracil
  modified_base 467: mod_base = OTHER; note = N1-methylpseudouracil
  modified_base 469: mod_base = OTHER; note = N1-methylpseudouracil
  modified_base 470: mod_base = OTHER; note = N1-methylpseudouracil
  modified_base 473: mod_base = OTHER; note = N1-methylpseudouracil
  modified_base 476: mod_base = OTHER; note = N1-methylpseudouracil
  modified_base 485: mod_base = OTHER; note = N1-methylpseudouracil
  modified_base 488: mod_base = OTHER; note = N1-methylpseudouracil
  modified_base 491: mod_base = OTHER; note = N1-methylpseudouracil
  modified_base 503: mod_base = OTHER; note = N1-methylpseudouracil
  modified_base 505: mod_base = OTHER; note = N1-methylpseudouracil
  modified_base 506: mod_base = OTHER; note = N1-methylpseudouracil
  modified_base 512: mod_base = OTHER; note = N1-methylpseudouracil
  modified_base 516: mod_base = OTHER; note = N1-methylpseudouracil
  modified_base 521: mod_base = OTHER; note = N1-methylpseudouracil
  modified_base 527: mod_base = OTHER; note = N1-methylpseudouracil
  modified_base 533: mod_base = OTHER; note = N1-methylpseudouracil
  modified_base 539: mod_base = OTHER; note = N1-methylpseudouracil
  modified_base 545: mod_base = OTHER; note = N1-methylpseudouracil
  modified_base 547: mod_base = OTHER; note = N1-methylpseudouracil
  modified_base 548: mod_base = OTHER; note = N1-methylpseudouracil
  modified_base 550: mod_base = OTHER; note = N1-methylpseudouracil
  modified_base 554: mod_base = OTHER; note = N1-methylpseudouracil
  modified_base 557: mod_base = OTHER; note = N1-methylpseudouracil
  modified_base 559: mod_base = OTHER; note = N1-methylpseudouracil
  modified_base 572: mod_base = OTHER; note = N1-methylpseudouracil
  modified_base 578: mod_base = OTHER; note = N1-methylpseudouracil
  modified_base 580: mod_base = OTHER; note = N1-methylpseudouracil
  modified_base 590: mod_base = OTHER; note = N1-methylpseudouracil
  modified_base 593: mod_base = OTHER; note = N1-methylpseudouracil
  modified_base 597: mod_base = OTHER; note = N1-methylpseudouracil
  modified_base 602: mod_base = OTHER; note = N1-methylpseudouracil
  modified_base 608: mod_base = OTHER; note = N1-methylpseudouracil
  modified_base 617: mod_base = OTHER; note = N1-methylpseudouracil
  modified_base 620: mod_base = OTHER; note = N1-methylpseudouracil
  modified_base 626: mod_base = OTHER; note = N1-methylpseudouracil
  modified_base 629: mod_base = OTHER; note = N1-methylpseudouracil
  modified_base 641: mod_base = OTHER; note = N1-methylpseudouracil
  modified_base 649: mod_base = OTHER; note = N1-methylpseudouracil
  modified_base 650: mod_base = OTHER; note = N1-methylpseudouracil
  modified_base 661: mod_base = OTHER; note = N1-methylpseudouracil
  modified_base 662: mod_base = OTHER; note = N1-methylpseudouracil
  modified_base 668: mod_base = OTHER; note = N1-methylpseudouracil
  modified_base 676: mod_base = OTHER; note = N1-methylpseudouracil
  modified_base 677: mod_base = OTHER; note = N1-methylpseudouracil
  modified_base 680: mod_base = OTHER; note = N1-methylpseudouracil
  modified_base 682: mod_base = OTHER; note = N1-methylpseudouracil
  modified_base 686: mod_base = OTHER; note = N1-methylpseudouracil
  modified_base 687: mod_base = OTHER; note = N1-methylpseudouracil
  modified_base 695: mod_base = OTHER; note = N1-methylpseudouracil
  modified_base 701: mod_base = OTHER; note = N1-methylpseudouracil
  modified_base 705: mod_base = OTHER; note = N1-methylpseudouracil
  modified_base 707: mod_base = OTHER; note = N1-methylpseudouracil
  modified_base 710: mod_base = OTHER; note = N1-methylpseudouracil
  modified_base 713: mod_base = OTHER; note = N1-methylpseudouracil
  modified_base 719: mod_base = OTHER; note = N1-methylpseudouracil
  modified_base 722: mod_base = OTHER; note = N1-methylpseudouracil
  modified_base 724: mod_base = OTHER; note = N1-methylpseudouracil
  modified_base 731: mod_base = OTHER; note = N1-methylpseudouracil
  modified_base 734: mod_base = OTHER; note = N1-methylpseudouracil
  modified_base 742: mod_base = OTHER; note = N1-methylpseudouracil
  modified_base 744: mod_base = OTHER; note = N1-methylpseudouracil
  modified_base 748: mod_base = OTHER; note = N1-methylpseudouracil
  modified_base 749: mod_base = OTHER; note = N1-methylpseudouracil
  modified_base 751: mod_base = OTHER; note = N1-methylpseudouracil
  modified_base 758: mod_base = OTHER; note = N1-methylpseudouracil
  modified_base 763: mod_base = OTHER; note = N1-methylpseudouracil
  modified_base 764: mod_base = OTHER; note = N1-methylpseudouracil
  modified_base 765: mod_base = OTHER; note = N1-methylpseudouracil
  modified_base 767: mod_base = OTHER; note = N1-methylpseudouracil
  modified_base 770: mod_base = OTHER; note = N1-methylpseudouracil
  modified_base 773: mod_base = OTHER; note = N1-methylpseudouracil
  modified_base 776: mod_base = OTHER; note = N1-methylpseudouracil
  modified_base 782: mod_base = OTHER; note = N1-methylpseudouracil
  modified_base 784: mod_base = OTHER; note = N1-methylpseudouracil
  modified_base 785: mod_base = OTHER; note = N1-methylpseudouracil
  modified_base 792: mod_base = OTHER; note = N1-methylpseudouracil
  modified_base 797: mod_base = OTHER; note = N1-methylpseudouracil
  modified_base 806: mod_base = OTHER; note = N1-methylpseudouracil
  modified_base 809: mod_base = OTHER; note = N1-methylpseudouracil
  modified_base 812: mod_base = OTHER; note = N1-methylpseudouracil
  modified_base 817: mod_base = OTHER; note = N1-methylpseudouracil
  modified_base 825: mod_base = OTHER; note = N1-methylpseudouracil
  modified_base 842: mod_base = OTHER; note = N1-methylpseudouracil
  modified_base 854: mod_base = OTHER; note = N1-methylpseudouracil
  modified_base 857: mod_base = OTHER; note = N1-methylpseudouracil
  modified_base 860: mod_base = OTHER; note = N1-methylpseudouracil
  modified_base 864: mod_base = OTHER; note = N1-methylpseudouracil
  modified_base 872: mod_base = OTHER; note = N1-methylpseudouracil
  modified_base 875: mod_base = OTHER; note = N1-methylpseudouracil
  modified_base 884: mod_base = OTHER; note = N1-methylpseudouracil
  modified_base 893: mod_base = OTHER; note = N1-methylpseudouracil
  modified_base 900: mod_base = OTHER; note = N1-methylpseudouracil
  modified_base 901: mod_base = OTHER; note = N1-methylpseudouracil
  modified_base 904: mod_base = OTHER; note = N1-methylpseudouracil
  modified_base 906: mod_base = OTHER; note = N1-methylpseudouracil
  modified_base 907: mod_base = OTHER; note = N1-methylpseudouracil
  modified_base 920: mod_base = OTHER; note = N1-methylpseudouracil
  modified_base 929: mod_base = OTHER; note = N1-methylpseudouracil
  modified_base 932: mod_base = OTHER; note = N1-methylpseudouracil
  modified_base 941: mod_base = OTHER; note = N1-methylpseudouracil
  modified_base 956: mod_base = OTHER; note = N1-methylpseudouracil
  modified_base 962: mod_base = OTHER; note = N1-methylpseudouracil
  modified_base 966: mod_base = OTHER; note = N1-methylpseudouracil
  modified_base 979: mod_base = OTHER; note = N1-methylpseudouracil
  modified_base 983: mod_base = OTHER; note = N1-methylpseudouracil
  modified_base 988: mod_base = OTHER; note = N1-methylpseudouracil
  modified_base 990: mod_base = OTHER; note = N1-methylpseudouracil
  modified_base 991: mod_base = OTHER; note = N1-methylpseudouracil
  modified_base 992: mod_base = OTHER; note = N1-methylpseudouracil
  modified_base 997: mod_base = OTHER; note = N1-methylpseudouracil
  modified_base 1006: mod_base = OTHER; note = N1-methylpseudouracil
  modified_base 1007: mod_base = OTHER; note = N1-methylpseudouracil
  modified_base 1009: mod_base = OTHER; note = N1-methylpseudouracil
  modified_base 1010: mod_base = OTHER; note = N1-methylpseudouracil
  modified_base 1012: mod_base = OTHER; note = N1-methylpseudouracil
  modified_base 1013: mod_base = OTHER; note = N1-methylpseudouracil
  modified_base 1021: mod_base = OTHER; note = N1-methylpseudouracil
  modified_base 1022: mod_base = OTHER; note = N1-methylpseudouracil
  modified_base 1024: mod_base = OTHER; note = N1-methylpseudouracil
  modified_base 1025: mod_base = OTHER; note = N1-methylpseudouracil
  modified_base 1028: mod_base = OTHER; note = N1-methylpseudouracil
  modified_base 1031: mod_base = OTHER; note = N1-methylpseudouracil
  modified_base 1033: mod_base = OTHER; note = N1-methylpseudouracil
  modified_base 1034: mod_base = OTHER; note = N1-methylpseudouracil
  modified_base 1037: mod_base = OTHER; note = N1-methylpseudouracil
  modified_base 1043: mod_base = OTHER; note = N1-methylpseudouracil
  modified_base 1046: mod_base = OTHER; note = N1-methylpseudouracil
  modified_base 1051: mod_base = OTHER; note = N1-methylpseudouracil
  modified_base 1058: mod_base = OTHER; note = N1-methylpseudouracil
  modified_base 1061: mod_base = OTHER; note = N1-methylpseudouracil
  modified_base 1070: mod_base = OTHER; note = N1-methylpseudouracil
  modified_base 1073: mod_base = OTHER; note = N1-methylpseudouracil
  modified_base 1076: mod_base = OTHER; note = N1-methylpseudouracil
  modified_base 1085: mod_base = OTHER; note = N1-methylpseudouracil
  modified_base 1087: mod_base = OTHER; note = N1-methylpseudouracil
  modified_base 1088: mod_base = OTHER; note = N1-methylpseudouracil
  modified_base 1097: mod_base = OTHER; note = N1-methylpseudouracil
  modified_base 1098: mod_base = OTHER; note = N1-methylpseudouracil
  modified_base 1102: mod_base = OTHER; note = N1-methylpseudouracil
  modified_base 1103: mod_base = OTHER; note = N1-methylpseudouracil
  modified_base 1105: mod_base = OTHER; note = N1-methylpseudouracil
  modified_base 1109: mod_base = OTHER; note = N1-methylpseudouracil
  modified_base 1112: mod_base = OTHER; note = N1-methylpseudouracil
  modified_base 1115: mod_base = OTHER; note = N1-methylpseudouracil
  modified_base 1121: mod_base = OTHER; note = N1-methylpseudouracil
  modified_base 1127: mod_base = OTHER; note = N1-methylpseudouracil
  modified_base 1138: mod_base = OTHER; note = N1-methylpseudouracil
  modified_base 1139: mod_base = OTHER; note = N1-methylpseudouracil
  modified_base 1143: mod_base = OTHER; note = N1-methylpseudouracil
  modified_base 1144: mod_base = OTHER; note = N1-methylpseudouracil
  modified_base 1151: mod_base = OTHER; note = N1-methylpseudouracil
  modified_base 1158: mod_base = OTHER; note = N1-methylpseudouracil
  modified_base 1159: mod_base = OTHER; note = N1-methylpseudouracil
  modified_base 1162: mod_base = OTHER; note = N1-methylpseudouracil
  modified_base 1172: mod_base = OTHER; note = N1-methylpseudouracil
  modified_base 1181: mod_base = OTHER; note = N1-methylpseudouracil
  modified_base 1190: mod_base = OTHER; note = N1-methylpseudouracil
  modified_base 1198: mod_base = OTHER; note = N1-methylpseudouracil
  modified_base 1199: mod_base = OTHER; note = N1-methylpseudouracil
  modified_base 1200: mod_base = OTHER; note = N1-methylpseudouracil
  modified_base 1202: mod_base = OTHER; note = N1-methylpseudouracil
  modified_base 1216: mod_base = OTHER; note = N1-methylpseudouracil
  modified_base 1218: mod_base = OTHER; note = N1-methylpseudouracil
  modified_base 1226: mod_base = OTHER; note = N1-methylpseudouracil
  modified_base 1231: mod_base = OTHER; note = N1-methylpseudouracil
  modified_base 1238: mod_base = OTHER; note = N1-methylpseudouracil
  modified_base 1253: mod_base = OTHER; note = N1-methylpseudouracil
  modified_base 1256: mod_base = OTHER; note = N1-methylpseudouracil
  modified_base 1259: mod_base = OTHER; note = N1-methylpseudouracil
  modified_base 1268: mod_base = OTHER; note = N1-methylpseudouracil
  modified_base 1276: mod_base = OTHER; note = N1-methylpseudouracil
  modified_base 1277: mod_base = OTHER; note = N1-methylpseudouracil
  modified_base 1279: mod_base = OTHER; note = N1-methylpseudouracil
  modified_base 1291: mod_base = OTHER; note = N1-methylpseudouracil
  modified_base 1292: mod_base = OTHER; note = N1-methylpseudouracil
  modified_base 1301: mod_base = OTHER; note = N1-methylpseudouracil
  modified_base 1303: mod_base = OTHER; note = N1-methylpseudouracil
  modified_base 1304: mod_base = OTHER; note = N1-methylpseudouracil
  modified_base 1326: mod_base = OTHER; note = N1-methylpseudouracil
  modified_base 1357: mod_base = OTHER; note = N1-methylpseudouracil
  modified_base 1361: mod_base = OTHER; note = N1-methylpseudouracil
  modified_base 1363: mod_base = OTHER; note = N1-methylpseudouracil
  modified_base 1364: mod_base = OTHER; note = N1-methylpseudouracil
  modified_base 1366: mod_base = OTHER; note = N1-methylpseudouracil
  modified_base 1367: mod_base = OTHER; note = N1-methylpseudouracil
  modified_base 1375: mod_base = OTHER; note = N1-methylpseudouracil
  modified_base 1376: mod_base = OTHER; note = N1-methylpseudouracil
  modified_base 1377: mod_base = OTHER; note = N1-methylpseudouracil
  modified_base 1382: mod_base = OTHER; note = N1-methylpseudouracil
  modified_base 1385: mod_base = OTHER; note = N1-methylpseudouracil
  modified_base 1395: mod_base = OTHER; note = N1-methylpseudouracil
  modified_base 1397: mod_base = OTHER; note = N1-methylpseudouracil
  modified_base 1400: mod_base = OTHER; note = N1-methylpseudouracil
  modified_base 1409: mod_base = OTHER; note = N1-methylpseudouracil
  modified_base 1414: mod_base = OTHER; note = N1-methylpseudouracil
  modified_base 1415: mod_base = OTHER; note = N1-methylpseudouracil
  modified_base 1421: mod_base = OTHER; note = N1-methylpseudouracil
  modified_base 1436: mod_base = OTHER; note = N1-methylpseudouracil
  modified_base 1439: mod_base = OTHER; note = N1-methylpseudouracil
  modified_base 1445: mod_base = OTHER; note = N1-methylpseudouracil
  modified_base 1453: mod_base = OTHER; note = N1-methylpseudouracil
  modified_base 1455: mod_base = OTHER; note = N1-methylpseudouracil
  modified_base 1478: mod_base = OTHER; note = N1-methylpseudouracil
  modified_base 1481: mod_base = OTHER; note = N1-methylpseudouracil
  modified_base 1484: mod_base = OTHER; note = N1-methylpseudouracil
  modified_base 1487: mod_base = OTHER; note = N1-methylpseudouracil
  modified_base 1490: mod_base = OTHER; note = N1-methylpseudouracil
  modified_base 1493: mod_base = OTHER; note = N1-methylpseudouracil
  modified_base 1502: mod_base = OTHER; note = N1-methylpseudouracil
  modified_base 1523: mod_base = OTHER; note = N1-methylpseudouracil
  modified_base 1541: mod_base = OTHER; note = N1-methylpseudouracil
  modified_base 1543: mod_base = OTHER; note = N1-methylpseudouracil
  modified_base 1546: mod_base = OTHER; note = N1-methylpseudouracil
  modified_base 1547: mod_base = OTHER; note = N1-methylpseudouracil
  modified_base 1549: mod_base = OTHER; note = N1-methylpseudouracil
  modified_base 1552: mod_base = OTHER; note = N1-methylpseudouracil
  modified_base 1558: mod_base = OTHER; note = N1-methylpseudouracil
  modified_base 1559: mod_base = OTHER; note = N1-methylpseudouracil
  modified_base 1561: mod_base = OTHER; note = N1-methylpseudouracil
  modified_base 1564: mod_base = OTHER; note = N1-methylpseudouracil
  modified_base 1568: mod_base = OTHER; note = N1-methylpseudouracil
  modified_base 1571: mod_base = OTHER; note = N1-methylpseudouracil
  modified_base 1583: mod_base = OTHER; note = N1-methylpseudouracil
  modified_base 1595: mod_base = OTHER; note = N1-methylpseudouracil
  modified_base 1598: mod_base = OTHER; note = N1-methylpseudouracil
  modified_base 1600: mod_base = OTHER; note = N1-methylpseudouracil
  modified_base 1601: mod_base = OTHER; note = N1-methylpseudouracil
  modified_base 1607: mod_base = OTHER; note = N1-methylpseudouracil
  modified_base 1612: mod_base = OTHER; note = N1-methylpseudouracil
  modified_base 1621: mod_base = OTHER; note = N1-methylpseudouracil
  modified_base 1627: mod_base = OTHER; note = N1-methylpseudouracil
  modified_base 1637: mod_base = OTHER; note = N1-methylpseudouracil
  modified_base 1640: mod_base = OTHER; note = N1-methylpseudouracil
  modified_base 1648: mod_base = OTHER; note = N1-methylpseudouracil
  modified_base 1655: mod_base = OTHER; note = N1-methylpseudouracil
  modified_base 1667: mod_base = OTHER; note = N1-methylpseudouracil
  modified_base 1669: mod_base = OTHER; note = N1-methylpseudouracil
  modified_base 1675: mod_base = OTHER; note = N1-methylpseudouracil
  modified_base 1676: mod_base = OTHER; note = N1-methylpseudouracil
  modified_base 1677: mod_base = OTHER; note = N1-methylpseudouracil
  modified_base 1694: mod_base = OTHER; note = N1-methylpseudouracil
  modified_base 1695: mod_base = OTHER; note = N1-methylpseudouracil
  modified_base 1697: mod_base = OTHER; note = N1-methylpseudouracil
  modified_base 1700: mod_base = OTHER; note = N1-methylpseudouracil
  modified_base 1715: mod_base = OTHER; note = N1-methylpseudouracil
  modified_base 1721: mod_base = OTHER; note = N1-methylpseudouracil
  modified_base 1723: mod_base = OTHER; note = N1-methylpseudouracil
  modified_base 1728: mod_base = OTHER; note = N1-methylpseudouracil
  modified_base 1737: mod_base = OTHER; note = N1-methylpseudouracil
  modified_base 1745: mod_base = OTHER; note = N1-methylpseudouracil
  modified_base 1747: mod_base = OTHER; note = N1-methylpseudouracil
  modified_base 1751: mod_base = OTHER; note = N1-methylpseudouracil
  modified_base 1761: mod_base = OTHER; note = N1-methylpseudouracil
  modified_base 1763: mod_base = OTHER; note = N1-methylpseudouracil
  modified_base 1765: mod_base = OTHER; note = N1-methylpseudouracil
  modified_base 1781: mod_base = OTHER; note = N1-methylpseudouracil
  modified_base 1783: mod_base = OTHER; note = N1-methylpseudouracil
  modified_base 1787: mod_base = OTHER; note = N1-methylpseudouracil
  modified_base 1790: mod_base = OTHER; note = N1-methylpseudouracil
  modified_base 1800: mod_base = OTHER; note = N1-methylpseudouracil
  modified_base 1801: mod_base = OTHER; note = N1-methylpseudouracil
  modified_base 1802: mod_base = OTHER; note = N1-methylpseudouracil
  modified_base 1803: mod_base = OTHER; note = N1-methylpseudouracil
  modified_base 1807: mod_base = OTHER; note = N1-methylpseudouracil
  modified_base 1811: mod_base = OTHER; note = N1-methylpseudouracil
  modified_base 1817: mod_base = OTHER; note = N1-methylpseudouracil
  modified_base 1820: mod_base = OTHER; note = N1-methylpseudouracil
  modified_base 1835: mod_base = OTHER; note = N1-methylpseudouracil
  modified_base 1837: mod_base = OTHER; note = N1-methylpseudouracil
  modified_base 1838: mod_base = OTHER; note = N1-methylpseudouracil
  modified_base 1843: mod_base = OTHER; note = N1-methylpseudouracil
  modified_base 1846: mod_base = OTHER; note = N1-methylpseudouracil
  modified_base 1850: mod_base = OTHER; note = N1-methylpseudouracil
  modified_base 1852: mod_base = OTHER; note = N1-methylpseudouracil
  modified_base 1854: mod_base = OTHER; note = N1-methylpseudouracil
  modified_base 1859: mod_base = OTHER; note = N1-methylpseudouracil
  modified_base 1862: mod_base = OTHER; note = N1-methylpseudouracil
  modified_base 1880: mod_base = OTHER; note = N1-methylpseudouracil
  modified_base 1883: mod_base = OTHER; note = N1-methylpseudouracil
  modified_base 1886: mod_base = OTHER; note = N1-methylpseudouracil
  modified_base 1898: mod_base = OTHER; note = N1-methylpseudouracil
  modified_base 1905: mod_base = OTHER; note = N1-methylpseudouracil
  modified_base 1907: mod_base = OTHER; note = N1-methylpseudouracil
  modified_base 1925: mod_base = OTHER; note = N1-methylpseudouracil
  modified_base 1928: mod_base = OTHER; note = N1-methylpseudouracil
  modified_base 1931: mod_base = OTHER; note = N1-methylpseudouracil
  modified_base 1934: mod_base = OTHER; note = N1-methylpseudouracil
  modified_base 1945: mod_base = OTHER; note = N1-methylpseudouracil
  modified_base 1951: mod_base = OTHER; note = N1-methylpseudouracil
  modified_base 1954: mod_base = OTHER; note = N1-methylpseudouracil
  modified_base 1955: mod_base = OTHER; note = N1-methylpseudouracil
  modified_base 1957: mod_base = OTHER; note = N1-methylpseudouracil
  modified_base 1966: mod_base = OTHER; note = N1-methylpseudouracil
  modified_base 1967: mod_base = OTHER; note = N1-methylpseudouracil
  modified_base 1976: mod_base = OTHER; note = N1-methylpseudouracil
  modified_base 1985: mod_base = OTHER; note = N1-methylpseudouracil
  modified_base 1996: mod_base = OTHER; note = N1-methylpseudouracil
  modified_base 1997: mod_base = OTHER; note = N1-methylpseudouracil
  modified_base 2002: mod_base = OTHER; note = N1-methylpseudouracil
  modified_base 2009: mod_base = OTHER; note = N1-methylpseudouracil
  modified_base 2012: mod_base = OTHER; note = N1-methylpseudouracil
  modified_base 2017: mod_base = OTHER; note = N1-methylpseudouracil
  modified_base 2022: mod_base = OTHER; note = N1-methylpseudouracil
  modified_base 2026: mod_base = OTHER; note = N1-methylpseudouracil
  modified_base 2027: mod_base = OTHER; note = N1-methylpseudouracil
  modified_base 2035: mod_base = OTHER; note = N1-methylpseudouracil
  modified_base 2036: mod_base = OTHER; note = N1-methylpseudouracil
  modified_base 2038: mod_base = OTHER; note = N1-methylpseudouracil
  modified_base 2056: mod_base = OTHER; note = N1-methylpseudouracil
  modified_base 2060: mod_base = OTHER; note = N1-methylpseudouracil
  modified_base 2061: mod_base = OTHER; note = N1-methylpseudouracil
  modified_base 2063: mod_base = OTHER; note = N1-methylpseudouracil
  modified_base 2075: mod_base = OTHER; note = N1-methylpseudouracil
  modified_base 2083: mod_base = OTHER; note = N1-methylpseudouracil
  modified_base 2084: mod_base = OTHER; note = N1-methylpseudouracil
  modified_base 2086: mod_base = OTHER; note = N1-methylpseudouracil
  modified_base 2090: mod_base = OTHER; note = N1-methylpseudouracil
  modified_base 2108: mod_base = OTHER; note = N1-methylpseudouracil
  modified_base 2113: mod_base = OTHER; note = N1-methylpseudouracil
  modified_base 2137: mod_base = OTHER; note = N1-methylpseudouracil
  modified_base 2138: mod_base = OTHER; note = N1-methylpseudouracil
  modified_base 2155: mod_base = OTHER; note = N1-methylpseudouracil
  modified_base 2156: mod_base = OTHER; note = N1-methylpseudouracil
  modified_base 2176: mod_base = OTHER; note = N1-methylpseudouracil
  modified_base 2180: mod_base = OTHER; note = N1-methylpseudouracil
  modified_base 2183: mod_base = OTHER; note = N1-methylpseudouracil
  modified_base 2192: mod_base = OTHER; note = N1-methylpseudouracil
  modified_base 2201: mod_base = OTHER; note = N1-methylpseudouracil
  modified_base 2209: mod_base = OTHER; note = N1-methylpseudouracil
  modified_base 2210: mod_base = OTHER; note = N1-methylpseudouracil
  modified_base 2216: mod_base = OTHER; note = N1-methylpseudouracil
  modified_base 2219: mod_base = OTHER; note = N1-methylpseudouracil
  modified_base 2232: mod_base = OTHER; note = N1-methylpseudouracil
  modified_base 2234: mod_base = OTHER; note = N1-methylpseudouracil
  modified_base 2240: mod_base = OTHER; note = N1-methylpseudouracil
  modified_base 2249: mod_base = OTHER; note = N1-methylpseudouracil
  modified_base 2273: mod_base = OTHER; note = N1-methylpseudouracil
  modified_base 2285: mod_base = OTHER; note = N1-methylpseudouracil
  modified_base 2287: mod_base = OTHER; note = N1-methylpseudouracil
  modified_base 2291: mod_base = OTHER; note = N1-methylpseudouracil
  modified_base 2294: mod_base = OTHER; note = N1-methylpseudouracil
  modified_base 2321: mod_base = OTHER; note = N1-methylpseudouracil
  modified_base 2324: mod_base = OTHER; note = N1-methylpseudouracil
  modified_base 2333: mod_base = OTHER; note = N1-methylpseudouracil
  modified_base 2335: mod_base = OTHER; note = N1-methylpseudouracil
  modified_base 2339: mod_base = OTHER; note = N1-methylpseudouracil
  modified_base 2342: mod_base = OTHER; note = N1-methylpseudouracil
  modified_base 2344: mod_base = OTHER; note = N1-methylpseudouracil
  modified_base 2349: mod_base = OTHER; note = N1-methylpseudouracil
  modified_base 2360: mod_base = OTHER; note = N1-methylpseudouracil
  modified_base 2384: mod_base = OTHER; note = N1-methylpseudouracil
  modified_base 2387: mod_base = OTHER; note = N1-methylpseudouracil
  modified_base 2393: mod_base = OTHER; note = N1-methylpseudouracil
  modified_base 2396: mod_base = OTHER; note = N1-methylpseudouracil
  modified_base 2408: mod_base = OTHER; note = N1-methylpseudouracil
  modified_base 2424: mod_base = OTHER; note = N1-methylpseudouracil
  modified_base 2426: mod_base = OTHER; note = N1-methylpseudouracil
  modified_base 2439: mod_base = OTHER; note = N1-methylpseudouracil
  modified_base 2459: mod_base = OTHER; note = N1-methylpseudouracil
  modified_base 2465: mod_base = OTHER; note = N1-methylpseudouracil
  modified_base 2469: mod_base = OTHER; note = N1-methylpseudouracil
  modified_base 2483: mod_base = OTHER; note = N1-methylpseudouracil
  modified_base 2492: mod_base = OTHER; note = N1-methylpseudouracil
  modified_base 2498: mod_base = OTHER; note = N1-methylpseudouracil
  modified_base 2500: mod_base = OTHER; note = N1-methylpseudouracil
  modified_base 2513: mod_base = OTHER; note = N1-methylpseudouracil
  modified_base 2531: mod_base = OTHER; note = N1-methylpseudouracil
  modified_base 2537: mod_base = OTHER; note = N1-methylpseudouracil
  modified_base 2549: mod_base = OTHER; note = N1-methylpseudouracil
  modified_base 2564: mod_base = OTHER; note = N1-methylpseudouracil
  modified_base 2572: mod_base = OTHER; note = N1-methylpseudouracil
  modified_base 2575: mod_base = OTHER; note = N1-methylpseudouracil
  modified_base 2576: mod_base = OTHER; note = N1-methylpseudouracil
  modified_base 2578: mod_base = OTHER; note = N1-methylpseudouracil
  modified_base 2579: mod_base = OTHER; note = N1-methylpseudouracil
  modified_base 2588: mod_base = OTHER; note = N1-methylpseudouracil
  modified_base 2593: mod_base = OTHER; note = N1-methylpseudouracil
  modified_base 2597: mod_base = OTHER; note = N1-methylpseudouracil
  modified_base 2606: mod_base = OTHER; note = N1-methylpseudouracil
  modified_base 2614: mod_base = OTHER; note = N1-methylpseudouracil
  modified_base 2623: mod_base = OTHER; note = N1-methylpseudouracil
  modified_base 2627: mod_base = OTHER; note = N1-methylpseudouracil
  modified_base 2632: mod_base = OTHER; note = N1-methylpseudouracil
  modified_base 2636: mod_base = OTHER; note = N1-methylpseudouracil
  modified_base 2642: mod_base = OTHER; note = N1-methylpseudouracil
  modified_base 2654: mod_base = OTHER; note = N1-methylpseudouracil
  modified_base 2657: mod_base = OTHER; note = N1-methylpseudouracil
  modified_base 2659: mod_base = OTHER; note = N1-methylpseudouracil
  modified_base 2660: mod_base = OTHER; note = N1-methylpseudouracil
  modified_base 2663: mod_base = OTHER; note = N1-methylpseudouracil
  modified_base 2666: mod_base = OTHER; note = N1-methylpseudouracil
  modified_base 2669: mod_base = OTHER; note = N1-methylpseudouracil
  modified_base 2671: mod_base = OTHER; note = N1-methylpseudouracil
  modified_base 2674: mod_base = OTHER; note = N1-methylpseudouracil
  modified_base 2678: mod_base = OTHER; note = N1-methylpseudouracil
  modified_base 2681: mod_base = OTHER; note = N1-methylpseudouracil
  modified_base 2684: mod_base = OTHER; note = N1-methylpseudouracil
  modified_base 2686: mod_base = OTHER; note = N1-methylpseudouracil
  modified_base 2687: mod_base = OTHER; note = N1-methylpseudouracil
  modified_base 2689: mod_base = OTHER; note = N1-methylpseudouracil
  modified_base 2690: mod_base = OTHER; note = N1-methylpseudouracil
  modified_base 2699: mod_base = OTHER; note = N1-methylpseudouracil
  modified_base 2707: mod_base = OTHER; note = N1-methylpseudouracil
  modified_base 2711: mod_base = OTHER; note = N1-methylpseudouracil
  modified_base 2714: mod_base = OTHER; note = N1-methylpseudouracil
  modified_base 2717: mod_base = OTHER; note = N1-methylpseudouracil
  modified_base 2720: mod_base = OTHER; note = N1-methylpseudouracil
  modified_base 2722: mod_base = OTHER; note = N1-methylpseudouracil
  modified_base 2726: mod_base = OTHER; note = N1-methylpseudouracil
  modified_base 2729: mod_base = OTHER; note = N1-methylpseudouracil
  modified_base 2736: mod_base = OTHER; note = N1-methylpseudouracil
  modified_base 2744: mod_base = OTHER; note = N1-methylpseudouracil
  modified_base 2761: mod_base = OTHER; note = N1-methylpseudouracil
  modified_base 2785: mod_base = OTHER; note = N1-methylpseudouracil
  modified_base 2792: mod_base = OTHER; note = N1-methylpseudouracil
  modified_base 2795: mod_base = OTHER; note = N1-methylpseudouracil
  modified_base 2798: mod_base = OTHER; note = N1-methylpseudouracil
  modified_base 2803: mod_base = OTHER; note = N1-methylpseudouracil
  modified_base 2815: mod_base = OTHER; note = N1-methylpseudouracil
  modified_base 2818: mod_base = OTHER; note = N1-methylpseudouracil
  modified_base 2822: mod_base = OTHER; note = N1-methylpseudouracil
  modified_base 2824: mod_base = OTHER; note = N1-methylpseudouracil
  modified_base 2825: mod_base = OTHER; note = N1-methylpseudouracil
  modified_base 2827: mod_base = OTHER; note = N1-methylpseudouracil
  modified_base 2831: mod_base = OTHER; note = N1-methylpseudouracil
  modified_base 2833: mod_base = OTHER; note = N1-methylpseudouracil
  modified_base 2837: mod_base = OTHER; note = N1-methylpseudouracil
  modified_base 2843: mod_base = OTHER; note = N1-methylpseudouracil
  modified_base 2855: mod_base = OTHER; note = N1-methylpseudouracil
  modified_base 2858: mod_base = OTHER; note = N1-methylpseudouracil
  modified_base 2864: mod_base = OTHER; note = N1-methylpseudouracil
  modified_base 2869: mod_base = OTHER; note = N1-methylpseudouracil
  modified_base 2870: mod_base = OTHER; note = N1-methylpseudouracil
  modified_base 2872: mod_base = OTHER; note = N1-methylpseudouracil
  modified_base 2873: mod_base = OTHER; note = N1-methylpseudouracil
  modified_base 2882: mod_base = OTHER; note = N1-methylpseudouracil
  modified_base 2886: mod_base = OTHER; note = N1-methylpseudouracil
  modified_base 2888: mod_base = OTHER; note = N1-methylpseudouracil
  modified_base 2891: mod_base = OTHER; note = N1-methylpseudouracil
  modified_base 2900: mod_base = OTHER; note = N1-methylpseudouracil
  modified_base 2903: mod_base = OTHER; note = N1-methylpseudouracil
  modified_base 2909: mod_base = OTHER; note = N1-methylpseudouracil
  modified_base 2918: mod_base = OTHER; note = N1-methylpseudouracil
  modified_base 2921: mod_base = OTHER; note = N1-methylpseudouracil
  modified_base 2933: mod_base = OTHER; note = N1-methylpseudouracil
  modified_base 2936: mod_base = OTHER; note = N1-methylpseudouracil
  modified_base 2945: mod_base = OTHER; note = N1-methylpseudouracil
  modified_base 2948: mod_base = OTHER; note = N1-methylpseudouracil
  modified_base 2955: mod_base = OTHER; note = N1-methylpseudouracil
  modified_base 2960: mod_base = OTHER; note = N1-methylpseudouracil
  modified_base 2962: mod_base = OTHER; note = N1-methylpseudouracil
  modified_base 2969: mod_base = OTHER; note = N1-methylpseudouracil
  modified_base 2978: mod_base = OTHER; note = N1-methylpseudouracil
  modified_base 2993: mod_base = OTHER; note = N1-methylpseudouracil
  modified_base 2996: mod_base = OTHER; note = N1-methylpseudouracil
  modified_base 3004: mod_base = OTHER; note = N1-methylpseudouracil
  modified_base 3005: mod_base = OTHER; note = N1-methylpseudouracil
  modified_base 3017: mod_base = OTHER; note = N1-methylpseudouracil
  modified_base 3023: mod_base = OTHER; note = N1-methylpseudouracil
  modified_base 3024: mod_base = OTHER; note = N1-methylpseudouracil
  modified_base 3026: mod_base = OTHER; note = N1-methylpseudouracil
  modified_base 3033: mod_base = OTHER; note = N1-methylpseudouracil
  modified_base 3035: mod_base = OTHER; note = N1-methylpseudouracil
  modified_base 3038: mod_base = OTHER; note = N1-methylpseudouracil
  modified_base 3044: mod_base = OTHER; note = N1-methylpseudouracil
  modified_base 3050: mod_base = OTHER; note = N1-methylpseudouracil
  modified_base 3052: mod_base = OTHER; note = N1-methylpseudouracil
  modified_base 3053: mod_base = OTHER; note = N1-methylpseudouracil
  modified_base 3058: mod_base = OTHER; note = N1-methylpseudouracil
  modified_base 3059: mod_base = OTHER; note = N1-methylpseudouracil
  modified_base 3062: mod_base = OTHER; note = N1-methylpseudouracil
  modified_base 3068: mod_base = OTHER; note = N1-methylpseudouracil
  modified_base 3071: mod_base = OTHER; note = N1-methylpseudouracil
  modified_base 3074: mod_base = OTHER; note = N1-methylpseudouracil
  modified_base 3077: mod_base = OTHER; note = N1-methylpseudouracil
  modified_base 3080: mod_base = OTHER; note = N1-methylpseudouracil
  modified_base 3083: mod_base = OTHER; note = N1-methylpseudouracil
  modified_base 3092: mod_base = OTHER; note = N1-methylpseudouracil
  modified_base 3098: mod_base = OTHER; note = N1-methylpseudouracil
  modified_base 3101: mod_base = OTHER; note = N1-methylpseudouracil
  modified_base 3107: mod_base = OTHER; note = N1-methylpseudouracil
  modified_base 3110: mod_base = OTHER; note = N1-methylpseudouracil
  modified_base 3118: mod_base = OTHER; note = N1-methylpseudouracil
  modified_base 3122: mod_base = OTHER; note = N1-methylpseudouracil
  modified_base 3124: mod_base = OTHER; note = N1-methylpseudouracil
  modified_base 3125: mod_base = OTHER; note = N1-methylpseudouracil
  modified_base 3128: mod_base = OTHER; note = N1-methylpseudouracil
  modified_base 3137: mod_base = OTHER; note = N1-methylpseudouracil
  modified_base 3143: mod_base = OTHER; note = N1-methylpseudouracil
  modified_base 3146: mod_base = OTHER; note = N1-methylpseudouracil
  modified_base 3149: mod_base = OTHER; note = N1-methylpseudouracil
  modified_base 3154: mod_base = OTHER; note = N1-methylpseudouracil
  modified_base 3155: mod_base = OTHER; note = N1-methylpseudouracil
  modified_base 3158: mod_base = OTHER; note = N1-methylpseudouracil
  modified_base 3161: mod_base = OTHER; note = N1-methylpseudouracil
  modified_base 3164: mod_base = OTHER; note = N1-methylpseudouracil
  modified_base 3172: mod_base = OTHER; note = N1-methylpseudouracil
  modified_base 3175: mod_base = OTHER; note = N1-methylpseudouracil
  modified_base 3176: mod_base = OTHER; note = N1-methylpseudouracil
  modified_base 3179: mod_base = OTHER; note = N1-methylpseudouracil
  modified_base 3187: mod_base = OTHER; note = N1-methylpseudouracil
  modified_base 3197: mod_base = OTHER; note = N1-methylpseudouracil
  modified_base 3206: mod_base = OTHER; note = N1-methylpseudouracil
  modified_base 3230: mod_base = OTHER; note = N1-methylpseudouracil
  modified_base 3232: mod_base = OTHER; note = N1-methylpseudouracil
  modified_base 3233: mod_base = OTHER; note = N1-methylpseudouracil
  modified_base 3242: mod_base = OTHER; note = N1-methylpseudouracil
  modified_base 3245: mod_base = OTHER; note = N1-methylpseudouracil
  modified_base 3249: mod_base = OTHER; note = N1-methylpseudouracil
  modified_base 3254: mod_base = OTHER; note = N1-methylpseudouracil
  modified_base 3263: mod_base = OTHER; note = N1-methylpseudouracil
  modified_base 3265: mod_base = OTHER; note = N1-methylpseudouracil
  modified_base 3272: mod_base = OTHER; note = N1-methylpseudouracil
  modified_base 3280: mod_base = OTHER; note = N1-methylpseudouracil
  modified_base 3281: mod_base = OTHER; note = N1-methylpseudouracil
  modified_base 3295: mod_base = OTHER; note = N1-methylpseudouracil
  modified_base 3298: mod_base = OTHER; note = N1-methylpseudouracil
  modified_base 3299: mod_base = OTHER; note = N1-methylpseudouracil
  modified_base 3308: mod_base = OTHER; note = N1-methylpseudouracil
  modified_base 3310: mod_base = OTHER; note = N1-methylpseudouracil
  modified_base 3311: mod_base = OTHER; note = N1-methylpseudouracil
  modified_base 3321: mod_base = OTHER; note = N1-methylpseudouracil
  modified_base 3323: mod_base = OTHER; note = N1-methylpseudouracil
  modified_base 3329: mod_base = OTHER; note = N1-methylpseudouracil
  modified_base 3343: mod_base = OTHER; note = N1-methylpseudouracil
  modified_base 3346: mod_base = OTHER; note = N1-methylpseudouracil
  modified_base 3347: mod_base = OTHER; note = N1-methylpseudouracil
  modified_base 3350: mod_base = OTHER; note = N1-methylpseudouracil
  modified_base 3352: mod_base = OTHER; note = N1-methylpseudouracil
  modified_base 3356: mod_base = OTHER; note = N1-methylpseudouracil
  modified_base 3365: mod_base = OTHER; note = N1-methylpseudouracil
  modified_base 3370: mod_base = OTHER; note = N1-methylpseudouracil
  modified_base 3373: mod_base = OTHER; note = N1-methylpseudouracil
  modified_base 3374: mod_base = OTHER; note = N1-methylpseudouracil
  modified_base 3380: mod_base = OTHER; note = N1-methylpseudouracil
  modified_base 3386: mod_base = OTHER; note = N1-methylpseudouracil
  modified_base 3392: mod_base = OTHER; note = N1-methylpseudouracil
  modified_base 3395: mod_base = OTHER; note = N1-methylpseudouracil
  modified_base 3397: mod_base = OTHER; note = N1-methylpseudouracil
  modified_base 3398: mod_base = OTHER; note = N1-methylpseudouracil
  modified_base 3401: mod_base = OTHER; note = N1-methylpseudouracil
  modified_base 3404: mod_base = OTHER; note = N1-methylpseudouracil
  modified_base 3406: mod_base = OTHER; note = N1-methylpseudouracil
  modified_base 3407: mod_base = OTHER; note = N1-methylpseudouracil
  modified_base 3409: mod_base = OTHER; note = N1-methylpseudouracil
  modified_base 3410: mod_base = OTHER; note = N1-methylpseudouracil
  modified_base 3413: mod_base = OTHER; note = N1-methylpseudouracil
  modified_base 3419: mod_base = OTHER; note = N1-methylpseudouracil
  modified_base 3424: mod_base = OTHER; note = N1-methylpseudouracil
  modified_base 3425: mod_base = OTHER; note = N1-methylpseudouracil
  modified_base 3428: mod_base = OTHER; note = N1-methylpseudouracil
  modified_base 3430: mod_base = OTHER; note = N1-methylpseudouracil
  modified_base 3434: mod_base = OTHER; note = N1-methylpseudouracil
  modified_base 3437: mod_base = OTHER; note = N1-methylpseudouracil
  modified_base 3464: mod_base = OTHER; note = N1-methylpseudouracil
  modified_base 3470: mod_base = OTHER; note = N1-methylpseudouracil
  modified_base 3473: mod_base = OTHER; note = N1-methylpseudouracil
  modified_base 3476: mod_base = OTHER; note = N1-methylpseudouracil
  modified_base 3482: mod_base = OTHER; note = N1-methylpseudouracil
  modified_base 3488: mod_base = OTHER; note = N1-methylpseudouracil
  modified_base 3492: mod_base = OTHER; note = N1-methylpseudouracil
  modified_base 3494: mod_base = OTHER; note = N1-methylpseudouracil
  modified_base 3497: mod_base = OTHER; note = N1-methylpseudouracil
  modified_base 3506: mod_base = OTHER; note = N1-methylpseudouracil
  modified_base 3511: mod_base = OTHER; note = N1-methylpseudouracil
  modified_base 3518: mod_base = OTHER; note = N1-methylpseudouracil
  modified_base 3530: mod_base = OTHER; note = N1-methylpseudouracil
  modified_base 3536: mod_base = OTHER; note = N1-methylpseudouracil
  modified_base 3545: mod_base = OTHER; note = N1-methylpseudouracil
  modified_base 3548: mod_base = OTHER; note = N1-methylpseudouracil
  modified_base 3553: mod_base = OTHER; note = N1-methylpseudouracil
  modified_base 3557: mod_base = OTHER; note = N1-methylpseudouracil
  modified_base 3559: mod_base = OTHER; note = N1-methylpseudouracil
  modified_base 3566: mod_base = OTHER; note = N1-methylpseudouracil
  modified_base 3568: mod_base = OTHER; note = N1-methylpseudouracil
  modified_base 3569: mod_base = OTHER; note = N1-methylpseudouracil
  modified_base 3574: mod_base = OTHER; note = N1-methylpseudouracil
  modified_base 3575: mod_base = OTHER; note = N1-methylpseudouracil
  modified_base 3578: mod_base = OTHER; note = N1-methylpseudouracil
  modified_base 3584: mod_base = OTHER; note = N1-methylpseudouracil
  modified_base 3622: mod_base = OTHER; note = N1-methylpseudouracil
  modified_base 3638: mod_base = OTHER; note = N1-methylpseudouracil
  modified_base 3647: mod_base = OTHER; note = N1-methylpseudouracil
  modified_base 3650: mod_base = OTHER; note = N1-methylpseudouracil
  modified_base 3653: mod_base = OTHER; note = N1-methylpseudouracil
  modified_base 3654: mod_base = OTHER; note = N1-methylpseudouracil
  modified_base 3656: mod_base = OTHER; note = N1-methylpseudouracil
  modified_base 3671: mod_base = OTHER; note = N1-methylpseudouracil
  modified_base 3686: mod_base = OTHER; note = N1-methylpseudouracil
  modified_base 3688: mod_base = OTHER; note = N1-methylpseudouracil
  modified_base 3693: mod_base = OTHER; note = N1-methylpseudouracil
  modified_base 3694: mod_base = OTHER; note = N1-methylpseudouracil
  modified_base 3707: mod_base = OTHER; note = N1-methylpseudouracil
  modified_base 3713: mod_base = OTHER; note = N1-methylpseudouracil
  modified_base 3722: mod_base = OTHER; note = N1-methylpseudouracil
  modified_base 3733: mod_base = OTHER; note = N1-methylpseudouracil
  modified_base 3755: mod_base = OTHER; note = N1-methylpseudouracil
  modified_base 3758: mod_base = OTHER; note = N1-methylpseudouracil
  modified_base 3767: mod_base = OTHER; note = N1-methylpseudouracil
  modified_base 3772: mod_base = OTHER; note = N1-methylpseudouracil
  modified_base 3773: mod_base = OTHER; note = N1-methylpseudouracil
  modified_base 3775: mod_base = OTHER; note = N1-methylpseudouracil
  modified_base 3779: mod_base = OTHER; note = N1-methylpseudouracil
  modified_base 3780: mod_base = OTHER; note = N1-methylpseudouracil
  modified_base 3786: mod_base = OTHER; note = N1-methylpseudouracil
  modified_base 3797: mod_base = OTHER; note = N1-methylpseudouracil
  modified_base 3803: mod_base = OTHER; note = N1-methylpseudouracil
  modified_base 3805: mod_base = OTHER; note = N1-methylpseudouracil
  modified_base 3806: mod_base = OTHER; note = N1-methylpseudouracil
  modified_base 3822: mod_base = OTHER; note = N1-methylpseudouracil
  modified_base 3836: mod_base = OTHER; note = N1-methylpseudouracil
  modified_base 3839: mod_base = OTHER; note = N1-methylpseudouracil
  modified_base 3841: mod_base = OTHER; note = N1-methylpseudouracil
  modified_base 3847: mod_base = OTHER; note = N1-methylpseudouracil
  modified_base 3848: mod_base = OTHER; note = N1-methylpseudouracil
  modified_base 3851: mod_base = OTHER; note = N1-methylpseudouracil
  modified_base 3857: mod_base = OTHER; note = N1-methylpseudouracil
  modified_base 3860: mod_base = OTHER; note = N1-methylpseudouracil
  modified_base 3878: mod_base = OTHER; note = N1-methylpseudouracil
  modified_base 3884: mod_base = OTHER; note = N1-methylpseudouracil
  modified_base 3893: mod_base = OTHER; note = N1-methylpseudouracil
  modified_base 3898: mod_base = OTHER; note = N1-methylpseudouracil
  modified_base 3908: mod_base = OTHER; note = N1-methylpseudouracil
  modified_base 3914: mod_base = OTHER; note = N1-methylpseudouracil
  modified_base 3922: mod_base = OTHER; note = N1-methylpseudouracil
  modified_base 3934: mod_base = OTHER; note = N1-methylpseudouracil
  modified_base 3935: mod_base = OTHER; note = N1-methylpseudouracil
  modified_base 3941: mod_base = OTHER; note = N1-methylpseudouracil
  modified_base 3944: mod_base = OTHER; note = N1-methylpseudouracil
  modified_base 3956: mod_base = OTHER; note = N1-methylpseudouracil
  modified_base 3958: mod_base = OTHER; note = N1-methylpseudouracil
  modified_base 3959: mod_base = OTHER; note = N1-methylpseudouracil
  modified_base 3960: mod_base = OTHER; note = N1-methylpseudouracil
  modified_base 3962: mod_base = OTHER; note = N1-methylpseudouracil
  modified_base 3963: mod_base = OTHER; note = N1-methylpseudouracil
  modified_base 3964: mod_base = OTHER; note = N1-methylpseudouracil
  modified_base 3965: mod_base = OTHER; note = N1-methylpseudouracil
  modified_base 3967: mod_base = OTHER; note = N1-methylpseudouracil
  modified_base 3969: mod_base = OTHER; note = N1-methylpseudouracil
  modified_base 3976: mod_base = OTHER; note = N1-methylpseudouracil
  modified_base 3977: mod_base = OTHER; note = N1-methylpseudouracil
  modified_base 3978: mod_base = OTHER; note = N1-methylpseudouracil
  modified_base 3989: mod_base = OTHER; note = N1-methylpseudouracil
  modified_base 3997: mod_base = OTHER; note = N1-methylpseudouracil
  modified_base 4006: mod_base = OTHER; note = N1-methylpseudouracil
  modified_base 4009: mod_base = OTHER; note = N1-methylpseudouracil
  modified_base 4022: mod_base = OTHER; note = N1-methylpseudouracil
  modified_base 4024: mod_base = OTHER; note = N1-methylpseudouracil
  modified_base 4031: mod_base = OTHER; note = N1-methylpseudouracil
  modified_base 4043: mod_base = OTHER; note = N1-methylpseudouracil
  modified_base 4049: mod_base = OTHER; note = N1-methylpseudouracil
  modified_base 4054: mod_base = OTHER; note = N1-methylpseudouracil
  modified_base 4058: mod_base = OTHER; note = N1-methylpseudouracil
  modified_base 4061: mod_base = OTHER; note = N1-methylpseudouracil
  modified_base 4069: mod_base = OTHER; note = N1-methylpseudouracil
  modified_base 4070: mod_base = OTHER; note = N1-methylpseudouracil
  modified_base 4082: mod_base = OTHER; note = N1-methylpseudouracil
  modified_base 4087: mod_base = OTHER; note = N1-methylpseudouracil
  modified_base 4088: mod_base = OTHER; note = N1-methylpseudouracil
  modified_base 4091: mod_base = OTHER; note = N1-methylpseudouracil
  modified_base 4094: mod_base = OTHER; note = N1-methylpseudouracil
  modified_base 4097: mod_base = OTHER; note = N1-methylpseudouracil
  modified_base 4108: mod_base = OTHER; note = N1-methylpseudouracil
  modified_base 4112: mod_base = OTHER; note = N1-methylpseudouracil
  modified_base 4115: mod_base = OTHER; note = N1-methylpseudouracil
  modified_base 4136: mod_base = OTHER; note = N1-methylpseudouracil
  modified_base 4139: mod_base = OTHER; note = N1-methylpseudouracil
  modified_base 4141: mod_base = OTHER; note = N1-methylpseudouracil
  modified_base 4145: mod_base = OTHER; note = N1-methylpseudouracil
  modified_base 4157: mod_base = OTHER; note = N1-methylpseudouracil
  modified_base 4160: mod_base = OTHER; note = N1-methylpseudouracil
  modified_base 4175: mod_base = OTHER; note = N1-methylpseudouracil
  modified_base 4178: mod_base = OTHER; note = N1-methylpseudouracil
  modified_base 4181: mod_base = OTHER; note = N1-methylpseudouracil
  modified_base 4184: mod_base = OTHER; note = N1-methylpseudouracil
  modified_base 4195: mod_base = OTHER; note = N1-methylpseudouracil
  modified_base 4205: mod_base = OTHER; note = N1-methylpseudouracil
  modified_base 4209: mod_base = OTHER; note = N1-methylpseudouracil
  modified_base 4214: mod_base = OTHER; note = N1-methylpseudouracil
  modified_base 4219: mod_base = OTHER; note = N1-methylpseudouracil
  modified_base 4226: mod_base = OTHER; note = N1-methylpseudouracil
  modified_base 4229: mod_base = OTHER; note = N1-methylpseudouracil
  modified_base 4241: mod_base = OTHER; note = N1-methylpseudouracil
  modified_base 4252: mod_base = OTHER; note = N1-methylpseudouracil
  modified_base 4253: mod_base = OTHER; note = N1-methylpseudouracil
  modified_base 4261: mod_base = OTHER; note = N1-methylpseudouracil
  modified_base 4268: mod_base = OTHER; note = N1-methylpseudouracil
  modified_base 4271: mod_base = OTHER; note = N1-methylpseudouracil
  modified_base 4274: mod_base = OTHER; note = N1-methylpseudouracil
  modified_base 4276: mod_base = OTHER; note = N1-methylpseudouracil
  modified_base 4289: mod_base = OTHER; note = N1-methylpseudouracil
  modified_base 4296: mod_base = OTHER; note = N1-methylpseudouracil
  modified_base 4298: mod_base = OTHER; note = N1-methylpseudouracil
  modified_base 4301: mod_base = OTHER; note = N1-methylpseudouracil
  modified_base 4306: mod_base = OTHER; note = N1-methylpseudouracil
  modified_base 4315: mod_base = OTHER; note = N1-methylpseudouracil
  modified_base 4316: mod_base = OTHER; note = N1-methylpseudouracil
  modified_base 4319: mod_base = OTHER; note = N1-methylpseudouracil
  modified_base 4322: mod_base = OTHER; note = N1-methylpseudouracil
  modified_base 4325: mod_base = OTHER; note = N1-methylpseudouracil
  modified_base 4340: mod_base = OTHER; note = N1-methylpseudouracil
  modified_base 4348: mod_base = OTHER; note = N1-methylpseudouracil
  modified_base 4354: mod_base = OTHER; note = N1-methylpseudouracil
  modified_base 4358: mod_base = OTHER; note = N1-methylpseudouracil
  modified_base 4367: mod_base = OTHER; note = N1-methylpseudouracil
  modified_base 4370: mod_base = OTHER; note = N1-methylpseudouracil
  modified_base 4385: mod_base = OTHER; note = N1-methylpseudouracil
  modified_base 4387: mod_base = OTHER; note = N1-methylpseudouracil
  modified_base 4388: mod_base = OTHER; note = N1-methylpseudouracil
  modified_base 4398: mod_base = OTHER; note = N1-methylpseudouracil
  modified_base 4400: mod_base = OTHER; note = N1-methylpseudouracil
  modified_base 4402: mod_base = OTHER; note = N1-methylpseudouracil
  modified_base 4404: mod_base = OTHER; note = N1-methylpseudouracil
  modified_base 4413: mod_base = OTHER; note = N1-methylpseudouracil
  modified_base 4418: mod_base = OTHER; note = N1-methylpseudouracil
  modified_base 4424: mod_base = OTHER; note = N1-methylpseudouracil
  modified_base 4426: mod_base = OTHER; note = N1-methylpseudouracil
  modified_base 4427: mod_base = OTHER; note = N1-methylpseudouracil
  modified_base 4431: mod_base = OTHER; note = N1-methylpseudouracil
  modified_base 4450: mod_base = OTHER; note = N1-methylpseudouracil
  modified_base 4456: mod_base = OTHER; note = N1-methylpseudouracil
  modified_base 4458: mod_base = OTHER; note = N1-methylpseudouracil
  modified_base 4469: mod_base = OTHER; note = N1-methylpseudouracil
  modified_base 4478: mod_base = OTHER; note = N1-methylpseudouracil
  modified_base 4502: mod_base = OTHER; note = N1-methylpseudouracil
  modified_base 4509: mod_base = OTHER; note = N1-methylpseudouracil
  modified_base 4517: mod_base = OTHER; note = N1-methylpseudouracil
  modified_base 4519: mod_base = OTHER; note = N1-methylpseudouracil
  modified_base 4525: mod_base = OTHER; note = N1-methylpseudouracil
  modified_base 4537: mod_base = OTHER; note = N1-methylpseudouracil
  modified_base 4541: mod_base = OTHER; note = N1-methylpseudouracil
  modified_base 4546: mod_base = OTHER; note = N1-methylpseudouracil
  modified_base 4550: mod_base = OTHER; note = N1-methylpseudouracil
  modified_base 4551: mod_base = OTHER; note = N1-methylpseudouracil
  modified_base 4553: mod_base = OTHER; note = N1-methylpseudouracil
  modified_base 4554: mod_base = OTHER; note = N1-methylpseudouracil
  modified_base 4560: mod_base = OTHER; note = N1-methylpseudouracil
  modified_base 4561: mod_base = OTHER; note = N1-methylpseudouracil
  modified_base 4567: mod_base = OTHER; note = N1-methylpseudouracil
  modified_base 4580: mod_base = OTHER; note = N1-methylpseudouracil
  modified_base 4583: mod_base = OTHER; note = N1-methylpseudouracil
  modified_base 4588: mod_base = OTHER; note = N1-methylpseudouracil
  modified_base 4589: mod_base = OTHER; note = N1-methylpseudouracil
  modified_base 4592: mod_base = OTHER; note = N1-methylpseudouracil
  modified_base 4600: mod_base = OTHER; note = N1-methylpseudouracil
  modified_base 4608: mod_base = OTHER; note = N1-methylpseudouracil
  modified_base 4611: mod_base = OTHER; note = N1-methylpseudouracil
  modified_base 4613: mod_base = OTHER; note = N1-methylpseudouracil
  modified_base 4614: mod_base = OTHER; note = N1-methylpseudouracil
  modified_base 4615: mod_base = OTHER; note = N1-methylpseudouracil
  modified_base 4619: mod_base = OTHER; note = N1-methylpseudouracil
  modified_base 4624: mod_base = OTHER; note = N1-methylpseudouracil
  modified_base 4626: mod_base = OTHER; note = N1-methylpseudouracil
  modified_base 4630: mod_base = OTHER; note = N1-methylpseudouracil
  modified_base 4738: mod_base = OTHER; note = N1-methylpseudouracil
  modified_base 4740: mod_base = OTHER; note = N1-methylpseudouracil
  modified_base 4763: mod_base = OTHER; note = Inverted deoxythymidine
  misc_feature 1..4762: note = RNA
  misc_feature 4763: note = DNA
ggaggaaatcgcaaaatttgctcttcgcgttagatttcttttagttttctcgcaactagcaagctttttgttctcgccatgcagcggagccctctggagaaggccagcgtggtgagcaagctgttcttcagctggaccaggcccatcctgcgaaagggctacagacagaggctggagctgtccgacatctaccagattccatccgtggacagcgccgacaatctgagcgagaagctggagagggagtgggaccgcgagctggccagcaagaagaaccctaagctgatcaacgccctgcgccgctgcttcttctggaggttcatgttctacggcatcttcctgtacctgggcgaggtgaccaaggccgtccagcctctgctgctgggccgcatcatcgccagctacgatcccgacaacaaggaggaacgctccatcgccatctacctgggcatcggcctgtgtctgctgttcatcgtgcggaccctgctgctgcaccccgccatcttcggcctgcatcacatcggcatgcagatgaggatcgccatgttctccctgatctacaagaagaccctgaagctgtccagccgcgtgctggataagatcagcatcgggcagctggtgagcctgctgagcaacaacctgaacaagttcgacgaggggttggcgctggcccacttcgtgtggattgccccgctgcaggtggctctgctgatggggctgatctgggagctgctgcaggcctctgccttctgcgggctggggtttctgatcgtgctggccctgttccaagctggcctgggccgcatgatgatgaagtaccgcgatcagagggccggcaagatcagcgagcgcctggtgatcactagcgagatgatagagaacatccagagcgtgaaggcttactgttgggaggaggccatggagaagatgatcgagaacctgaggcagaccgagctgaagctgactagaaaggcagcctacgtgaggtatttcaactccagcgccttcttcttcagcggcttcttcgtggtgttcctgagcgtgctgccctacgccctgatcaagggcatcatcctgaggaagatcttcaccaccattagcttctgcatcgtgctgcgcatggccgtgaccaggcagttcccttgggccgtgcagacttggtacgacagcctgggagccatcaacaagatccaggactttctgcagaagcaggaatataagaccctggagtacaacctgaccaccaccgaggtggtgatggagaacgtgaccgccttctgggaggagggcttcggcgagctgttcgagaaggccaagcagaacaataacaaccgcaagaccagcaacggcgacgactccctcttcttcagcaactttagcctgctgggcacccctgtgctgaaggacatcaacttcaagatcgaaagaggccaactgctggccgtggccggatctaccggcgccggcaagaccagcctgctgatgatgatcatgggcgagctggagcccagcgagggcaagatcaagcacagcggccggatctccttctgctcccagttctcctggatcatgcccggcaccatcaaggagaacatcatcttcggcgtgagctacgacgagtacaggtaccggagcgtgatcaaggcctgccagctggaggaggacatctccaaatttgccgagaaggacaacattgtgctgggcgaaggcgggatcaccctgtccggtggccagcgtgcacgcatctccctggcccgggctgtgtacaaggacgccgacctgtacctgctggacagcccttttggctacctggacgtgctgaccgagaaggagatcttcgagtcctgcgtgtgtaagctgatggccaacaagaccagaatcctggtgaccagcaagatggagcatctgaagaaggccgacaagatcctgatcctgcacgaggggtccagctacttctacggcaccttcagcgagctgcagaacctgcagcccgacttcagctccaagctgatgggctgcgatagcttcgaccagttctccgccgagagaaggaactccattctgaccgagaccctgcaccgattctccctggagggagacgccccagtgagctggaccgagaccaagaagcagagcttcaagcagaccggcgagttcggagagaagcgcaagaactccatcctcaaccccatcaacagcatccggaagttcagcatcgtgcagaagacccctctgcagatgaacgggatcgaggaggacagcgacgagcccctggaacggcgactgtccctcgtgcccgacagcgagcagggcgaggccatcctgccccggatctccgtgatctccactgggcccaccctgcaagcccgacggcggcaaagcgtgctgaacctgatgacccacagcgtgaaccagggccagaatatccaccgcaagactacagccagcacccgcaaggtgagcctggctccccaggccaacctgaccgagctggacatctacagcaggaggctgagccaggagacaggcctggagatcagcgaggagatcaacgaggaggacctgaaggagtgcttcttcgacgacatggagtccatccccgccgtgaccacctggaacacctacctgagatacatcaccgtgcacaagagcctgatcttcgtgctgatctggtgcctggtgatcttcttggccgaggtagccgcctcactggtggtgctgtggctgctgggcaataccccactgcaggacaaggggaactccacccacagccggaacaacagctacgccgtgatcatcacctccaccagcagctactacgtgttctacatctacgtgggcgtggccgacacactgctggccatgggcttcttcagaggcctccctctggtgcacacactgatcaccgtgagcaagatcctgcaccacaagatgctgcacagcgtgctgcaggctcccatgtcaaccctgaacaccctgaaggccggcggcatcctgaacaggttcagcaaggacatcgccattctggacgatctgctgcccctgaccatcttcgacttcatccagctgctgctgatcgtgatcggggccatcgccgtggtggccgtgctgcagccctacatcttcgtggccacagtgcccgtgatcgtggccttcatcatgctgcgcgcctacttcctgcagacctcccagcagctgaagcagctggagagcgaaggccgcagccccatcttcacccacctggtgactagcctgaaggggctgtggaccctgcgcgccttcggcaggcagccctacttcgagaccctgttccacaaggctctgaacctgcacaccgccaactggttcctgtacctcagcaccctgcgctggttccagatgcggatcgagatgatcttcgtgatcttcttcatcgccgtgaccttcatctccatcctgaccaccggggaaggcgagggacgggtgggaatcatcctgaccctggccatgaatatcatgagcaccctgcagtgggccgtgaacagcagcatcgacgtggacagcctgatgcggtccgtgtcccgggtgttcaagttcatcgacatgcccaccgagggcaagcccaccaagagcaccaagccctacaagaacggccagctgagcaaggtgatgattatcgagaacagccacgtgaagaaggacgacatctggccttccggcggccagatgaccgtgaaggacctgaccgccaagtacaccgagggcggcaacgccatcctggagaacatcagcttctccattagccctggacagcgggtgggcctgttgggacggaccggcagtgggaagagcaccctgctgtccgccttcctgcggctgctgaacacggagggcgagatccagatcgacggggtgagctgggacagcatcaccctgcagcagtggcgaaaggccttcggcgtgatcccacagaaggtgtttattttctctggcacctttaggaagaacctggacccctacgagcagtggtccgaccaggagatctggaaggtggccgacgaggtgggcctgcggtcagtgatcgagcagttccccggcaagctggacttcgtgctggtggacggcggctgcgtgctgagccacggccacaagcagctgatgtgcctggcacgcagcgtgctgagcaaggccaagatcctgctgctggacgagccctccgcgcacctggatcccgtgacctaccagatcatcaggcggaccctgaagcaggccttcgccgactgcaccgtgatcctgtgcgagagcagaatcgaggctatgctggagtgccagcagttcctggtgatcgaggagaacaaggtgcggcagtacgactccatccagaagctgctgaacgagcgcagcctgttcagacaggctatctctcccagcgatcgcgtgaagctgttccctcacaggaacagcagcaagtgcaagtctaagccacagatcgccgccctgaaggaggagaccgaggaggaggtgcaggatacccgcctgtaaagctccccgggggcctcggtggcctagcttcttgccccttgggcctccccccagcccctcctccccttcctgcacccgtacccccgtggtctttgaataaagtctgagtgggcggcaaaaaaaaaaaaaaaaaaaaaaaaaaaaaaaaaaaaaaaaaaaaaaaaaaaaaaaaaaaaaaaaaaaaaaaaaaaaaaaaaaaaaaaaaaaaaaaaaaaatctagaaaaaaaaaaaaaaaaaaaat

SEQ ID NO: 24 - DNA, 4667 bp, synthetic construct
  source 1..4667: mol_type = other DNA
  modified_base 1: mod_base = OTHER; note = 7-Methylguanosine with triphosphate linkage
  modified_base 2: mod_base = OTHER; note = 2'-O-methyl modified nucleotide
  modified_base 9: mod_base = OTHER; note = N1-methylpseudouracil
  modified_base 17: mod_base = OTHER; note = N1-methylpseudouracil
  modified_base 18: mod_base = OTHER; note = N1-methylpseudouracil
  modified_base 19: mod_base = OTHER; note = N1-methylpseudouracil
  modified_base 22: mod_base = OTHER; note = N1-methylpseudouracil
  modified_base 24: mod_base = OTHER; note = N1-methylpseudouracil
  modified_base 25: mod_base = OTHER; note = N1-methylpseudouracil
  modified_base 30: mod_base = OTHER; note = N1-methylpseudouracil
  modified_base 31: mod_base = OTHER; note = N1-methylpseudouracil
  modified_base 35: mod_base = OTHER; note = N1-methylpseudouracil
  modified_base 36: mod_base = OTHER; note = N1-methylpseudouracil
  modified_base 37: mod_base = OTHER; note = N1-methylpseudouracil
  modified_base 39: mod_base = OTHER; note = N1-methylpseudouracil
  modified_base 40: mod_base = OTHER; note = N1-methylpseudouracil
  modified_base 41: mod_base = OTHER; note = N1-methylpseudouracil
  modified_base 42: mod_base = OTHER; note = N1-methylpseudouracil
  modified_base 45: mod_base = OTHER; note = N1-methylpseudouracil
  modified_base 46: mod_base = OTHER; note = N1-methylpseudouracil
  modified_base 47: mod_base = OTHER; note = N1-methylpseudouracil
  modified_base 48: mod_base = OTHER; note = N1-methylpseudouracil
  modified_base 50: mod_base = OTHER; note = N1-methylpseudouracil
  modified_base 57: mod_base = OTHER; note = N1-methylpseudouracil
  modified_base 65: mod_base = OTHER; note = N1-methylpseudouracil
  modified_base 66: mod_base = OTHER; note = N1-methylpseudouracil
  modified_base 67: mod_base = OTHER; note = N1-methylpseudouracil
  modified_base 68: mod_base = OTHER; note = N1-methylpseudouracil
  modified_base 69: mod_base = OTHER; note = N1-methylpseudouracil
  modified_base 71: mod_base = OTHER; note = N1-methylpseudouracil
  modified_base 72: mod_base = OTHER; note = N1-methylpseudouracil
  modified_base 74: mod_base = OTHER; note = N1-methylpseudouracil
  modified_base 80: mod_base = OTHER; note = N1-methylpseudouracil
  modified_base 93: mod_base = OTHER; note = N1-methylpseudouracil
  modified_base 95: mod_base = OTHER; note = N1-methylpseudouracil
  modified_base 110: mod_base = OTHER; note = N1-methylpseudouracil
  modified_base 113: mod_base = OTHER; note = N1-methylpseudouracil
  modified_base 122: mod_base = OTHER; note = N1-methylpseudouracil
  modified_base 124: mod_base = OTHER; note = N1-methylpseudouracil
  modified_base 125: mod_base = OTHER; note = N1-methylpseudouracil
  modified_base 127: mod_base = OTHER; note = N1-methylpseudouracil
  modified_base 128: mod_base = OTHER; note = N1-methylpseudouracil
  modified_base 133: mod_base = OTHER; note = N1-methylpseudouracil
  modified_base 146: mod_base = OTHER; note = N1-methylpseudouracil
  modified_base 149: mod_base = OTHER; note = N1-methylpseudouracil
  modified_base 160: mod_base = OTHER; note = N1-methylpseudouracil
  modified_base 173: mod_base = OTHER; note = N1-methylpseudouracil
  modified_base 179: mod_base = OTHER; note = N1-methylpseudouracil
  modified_base 181: mod_base = OTHER; note = N1-methylpseudouracil
  modified_base 188: mod_base = OTHER; note = N1-methylpseudouracil
  modified_base 190: mod_base = OTHER; note = N1-methylpseudouracil
  modified_base 197: mod_base = OTHER; note = N1-methylpseudouracil
  modified_base 198: mod_base = OTHER; note = N1-methylpseudouracil
  modified_base 202: mod_base = OTHER; note = N1-methylpseudouracil
  modified_base 206: mod_base = OTHER; note = N1-methylpseudouracil
  modified_base 222: mod_base = OTHER; note = N1-methylpseudouracil
  modified_base 224: mod_base = OTHER; note = N1-methylpseudouracil
  modified_base 236: mod_base = OTHER; note = N1-methylpseudouracil
  modified_base 247: mod_base = OTHER; note = N1-methylpseudouracil
  modified_base 260: mod_base = OTHER; note = N1-methylpseudouracil
  modified_base 279: mod_base = OTHER; note = N1-methylpseudouracil
  modified_base 284: mod_base = OTHER; note = N1-methylpseudouracil
  modified_base 287: mod_base = OTHER; note = N1-methylpseudouracil
  modified_base 296: mod_base = OTHER; note = N1-methylpseudouracil
  modified_base 304: mod_base = OTHER; note = N1-methylpseudouracil
  modified_base 307: mod_base = OTHER; note = N1-methylpseudouracil
  modified_base 308: mod_base = OTHER; note = N1-methylpseudouracil
  modified_base 310: mod_base = OTHER; note = N1-methylpseudouracil
  modified_base 311: mod_base = OTHER; note = N1-methylpseudouracil
  modified_base 313: mod_base = OTHER; note = N1-methylpseudouracil
  modified_base 319: mod_base = OTHER; note = N1-methylpseudouracil
  modified_base 320: mod_base = OTHER; note = N1-methylpseudouracil
  modified_base 323: mod_base = OTHER; note = N1-methylpseudouracil
  modified_base 325: mod_base = OTHER; note = N1-methylpseudouracil
  modified_base 326: mod_base = OTHER; note = N1-methylpseudouracil
  modified_base 328: mod_base = OTHER; note = N1-methylpseudouracil
  modified_base 335: mod_base = OTHER; note = N1-methylpseudouracil
  modified_base 337: mod_base = OTHER; note = N1-methylpseudouracil
  modified_base 338: mod_base = OTHER; note = N1-methylpseudouracil
  modified_base 341: mod_base = OTHER; note = N1-methylpseudouracil
  modified_base 343: mod_base = OTHER; note = N1-methylpseudouracil
  modified_base 347: mod_base = OTHER; note = N1-methylpseudouracil
  modified_base 356: mod_base = OTHER; note = N1-methylpseudouracil
  modified_base 368: mod_base = OTHER; note = N1-methylpseudouracil
  modified_base 375: mod_base = OTHER; note = N1-methylpseudouracil
  modified_base 377: mod_base = OTHER; note = N1-methylpseudouracil
  modified_base 380: mod_base = OTHER; note = N1-methylpseudouracil
  modified_base 383: mod_base = OTHER; note = N1-methylpseudouracil
  modified_base 392: mod_base = OTHER; note = N1-methylpseudouracil
  modified_base 395: mod_base = OTHER; note = N1-methylpseudouracil
  modified_base 403: mod_base = OTHER; note = N1-methylpseudouracil
  modified_base 408: mod_base = OTHER; note = N1-methylpseudouracil
  modified_base 430: mod_base = OTHER; note = N1-methylpseudouracil
  modified_base 434: mod_base = OTHER; note = N1-methylpseudouracil
  modified_base 440: mod_base = OTHER; note = N1-methylpseudouracil
  modified_base 442: mod_base = OTHER; note = N1-methylpseudouracil
  modified_base 446: mod_base = OTHER; note = N1-methylpseudouracil
  modified_base 452: mod_base = OTHER; note = N1-methylpseudouracil
  modified_base 458: mod_base = OTHER; note = N1-methylpseudouracil
  modified_base 460: mod_base = OTHER; note = N1-methylpseudouracil
  modified_base 462: mod_base = OTHER; note = N1-methylpseudouracil
  modified_base 464: mod_base = OTHER; note = N1-methylpseudouracil
  modified_base 467: mod_base = OTHER; note = N1-methylpseudouracil
  modified_base 469: mod_base = OTHER; note = N1-methylpseudouracil
  modified_base 470: mod_base = OTHER; note = N1-methylpseudouracil
  modified_base 473: mod_base = OTHER; note = N1-methylpseudouracil
  modified_base 476: mod_base = OTHER; note = N1-methylpseudouracil
  modified_base 485: mod_base = OTHER; note = N1-methylpseudouracil
  modified_base 488: mod_base = OTHER; note = N1-methylpseudouracil
  modified_base 491: mod_base = OTHER; note = N1-methylpseudouracil
  modified_base 503: mod_base = OTHER; note = N1-methylpseudouracil
  modified_base 505: mod_base = OTHER; note = N1-methylpseudouracil
  modified_base 506: mod_base = OTHER; note = N1-methylpseudouracil
  modified_base 512: mod_base = OTHER; note = N1-methylpseudouracil
  modified_base 516: mod_base = OTHER; note = N1-methylpseudouracil
  modified_base 521: mod_base = OTHER; note = N1-methylpseudouracil
  modified_base 527: mod_base = OTHER; note = N1-methylpseudouracil
  modified_base 533: mod_base = OTHER; note = N1-methylpseudouracil
  modified_base 539: mod_base = OTHER; note = N1-methylpseudouracil
  modified_base 545: mod_base = OTHER; note = N1-methylpseudouracil
  modified_base 547: mod_base = OTHER; note = N1-methylpseudouracil
  modified_base 548: mod_base = OTHER; note = N1-methylpseudouracil
  modified_base 550: mod_base = OTHER; note = N1-methylpseudouracil
  modified_base 554: mod_base = OTHER; note = N1-methylpseudouracil
  modified_base 557: mod_base = OTHER; note = N1-methylpseudouracil
  modified_base 559: mod_base = OTHER; note = N1-methylpseudouracil
  modified_base 572: mod_base = OTHER; note = N1-methylpseudouracil
  modified_base 578: mod_base = OTHER; note = N1-methylpseudouracil
  modified_base 580: mod_base = OTHER; note = N1-methylpseudouracil
  modified_base 590: mod_base = OTHER; note = N1-methylpseudouracil
  modified_base 593: mod_base = OTHER; note = N1-methylpseudouracil
  modified_base 597: mod_base = OTHER; note = N1-methylpseudouracil
  modified_base 602: mod_base = OTHER; note = N1-methylpseudouracil
  modified_base 608: mod_base = OTHER; note = N1-methylpseudouracil
  modified_base 617: mod_base = OTHER; note = N1-methylpseudouracil
  modified_base 620: mod_base = OTHER; note = N1-methylpseudouracil
  modified_base 626: mod_base = OTHER; note = N1-methylpseudouracil
  modified_base 629: mod_base = OTHER; note = N1-methylpseudouracil
  modified_base 641: mod_base = OTHER; note = N1-methylpseudouracil
  modified_base 649: mod_base = OTHER; note = N1-methylpseudouracil
  modified_base 650: mod_base = OTHER; note = N1-methylpseudouracil
  modified_base 661: mod_base = OTHER; note = N1-methylpseudouracil
  modified_base 662: mod_base = OTHER; note = N1-methylpseudouracil
  modified_base 668: mod_base = OTHER; note = N1-methylpseudouracil
  modified_base 676: mod_base = OTHER; note = N1-methylpseudouracil
  modified_base 677: mod_base = OTHER; note = N1-methylpseudouracil
  modified_base 680: mod_base = OTHER; note = N1-methylpseudouracil
  modified_base 682: mod_base = OTHER; note = N1-methylpseudouracil
  modified_base 686: mod_base = OTHER; note = N1-methylpseudouracil
  modified_base 687: mod_base = OTHER; note = N1-methylpseudouracil
  modified_base 695: mod_base = OTHER; note = N1-methylpseudouracil
  modified_base 701: mod_base = OTHER; note = N1-methylpseudouracil
  modified_base 705: mod_base = OTHER; note = N1-methylpseudouracil
  modified_base 707: mod_base = OTHER; note = N1-methylpseudouracil
  modified_base 710: mod_base = OTHER; note = N1-methylpseudouracil
  modified_base 713: mod_base = OTHER; note = N1-methylpseudouracil
  modified_base 719: mod_base = OTHER; note = N1-methylpseudouracil
  modified_base 722: mod_base = OTHER; note = N1-methylpseudouracil
  modified_base 724: mod_base = OTHER; note = N1-methylpseudouracil
  modified_base 731: mod_base = OTHER; note = N1-methylpseudouracil
  modified_base 734: mod_base = OTHER; note = N1-methylpseudouracil
  modified_base 742: mod_base = OTHER; note = N1-methylpseudouracil
  modified_base 744: mod_base = OTHER; note = N1-methylpseudouracil
  modified_base 748: mod_base = OTHER; note = N1-methylpseudouracil
  modified_base 749: mod_base = OTHER; note = N1-methylpseudouracil
  modified_base 751: mod_base = OTHER; note = N1-methylpseudouracil
  modified_base 758: mod_base = OTHER; note = N1-methylpseudouracil
  modified_base 763: mod_base = OTHER; note = N1-methylpseudouracil
  modified_base 764: mod_base = OTHER; note = N1-methylpseudouracil
  modified_base 765: mod_base = OTHER; note = N1-methylpseudouracil
  modified_base 767: mod_base = OTHER; note = N1-methylpseudouracil
  modified_base 770: mod_base = OTHER; note = N1-methylpseudouracil
  modified_base 773: mod_base = OTHER; note = N1-methylpseudouracil
  modified_base 776: mod_base = OTHER; note = N1-methylpseudouracil
  modified_base 782: mod_base = OTHER; note = N1-methylpseudouracil
  modified_base 784: mod_base = OTHER; note = N1-methylpseudouracil
  modified_base 785: mod_base = OTHER; note = N1-methylpseudouracil
  modified_base 792: mod_base = OTHER; note = N1-methylpseudouracil
  modified_base 797: mod_base = OTHER; note = N1-methylpseudouracil
  modified_base 806: mod_base = OTHER; note = N1-methylpseudouracil
  modified_base 809: mod_base = OTHER; note = N1-methylpseudouracil
  modified_base 812: mod_base = OTHER; note = N1-methylpseudouracil
  modified_base 817: mod_base = OTHER; note = N1-methylpseudouracil
  modified_base 825: mod_base = OTHER; note = N1-methylpseudouracil
  modified_base 842: mod_base = OTHER; note = N1-methylpseudouracil
  modified_base 854: mod_base = OTHER; note = N1-methylpseudouracil
  modified_base 857: mod_base = OTHER; note = N1-methylpseudouracil
  modified_base 860: mod_base = OTHER; note = N1-methylpseudouracil
  modified_base 864: mod_base = OTHER; note = N1-methylpseudouracil
  modified_base 872: mod_base = OTHER; note = N1-methylpseudouracil
  modified_base 875: mod_base = OTHER; note = N1-methylpseudouracil
  modified_base 884: mod_base = OTHER; note = N1-methylpseudouracil
  modified_base 893: mod_base = OTHER; note = N1-methylpseudouracil
  modified_base 900: mod_base = OTHER; note = N1-methylpseudouracil
  modified_base 901: mod_base = OTHER; note = N1-methylpseudouracil
  modified_base 904: mod_base = OTHER; note = N1-methylpseudouracil
  modified_base 906: mod_base = OTHER; note = N1-methylpseudouracil
  modified_base 907: mod_base = OTHER; note = N1-methylpseudouracil
  modified_base 920: mod_base = OTHER; note = N1-methylpseudouracil
  modified_base 929: mod_base = OTHER; note = N1-methylpseudouracil
  modified_base 932: mod_base = OTHER; note = N1-methylpseudouracil
  modified_base 941: mod_base = OTHER; note = N1-methylpseudouracil
  modified_base 956: mod_base = OTHER; note = N1-methylpseudouracil
  modified_base 962: mod_base = OTHER; note = N1-methylpseudouracil
  modified_base 966: mod_base = OTHER; note = N1-methylpseudouracil
  modified_base 979: mod_base = OTHER; note = N1-methylpseudouracil
  modified_base 983: mod_base = OTHER; note = N1-methylpseudouracil
  modified_base 988: mod_base = OTHER; note = N1-methylpseudouracil
  modified_base 990: mod_base = OTHER; note = N1-methylpseudouracil
  modified_base 991: mod_base = OTHER; note = N1-methylpseudouracil
  modified_base 992: mod_base = OTHER; note = N1-methylpseudouracil
  modified_base 997: mod_base = OTHER; note = N1-methylpseudouracil
  modified_base 1006: mod_base = OTHER; note = N1-methylpseudouracil
  modified_base 1007: mod_base = OTHER; note = N1-methylpseudouracil
  modified_base 1009: mod_base = OTHER; note = N1-methylpseudouracil
  modified_base 1010: mod_base = OTHER; note = N1-methylpseudouracil
  modified_base 1012: mod_base = OTHER; note = N1-methylpseudouracil
  modified_base 1013: mod_base = OTHER; note = N1-methylpseudouracil
  modified_base 1021: mod_base = OTHER; note = N1-methylpseudouracil
  modified_base 1022: mod_base = OTHER; note = N1-methylpseudouracil
  modified_base 1024: mod_base = OTHER; note = N1-methylpseudouracil
  modified_base 1025: mod_base = OTHER; note = N1-methylpseudouracil
  modified_base 1028: mod_base = OTHER; note = N1-methylpseudouracil
  modified_base 1031: mod_base = OTHER; note = N1-methylpseudouracil
  modified_base 1033: mod_base = OTHER; note = N1-methylpseudouracil
  modified_base 1034: mod_base = OTHER; note = N1-methylpseudouracil
  modified_base 1037: mod_base = OTHER; note = N1-methylpseudouracil
  modified_base 1043: mod_base = OTHER; note = N1-methylpseudouracil
  modified_base 1046: mod_base = OTHER; note = N1-methylpseudouracil
  modified_base 1051: mod_base = OTHER; note = N1-methylpseudouracil
  modified_base 1058: mod_base = OTHER; note = N1-methylpseudouracil
  modified_base 1061: mod_base = OTHER; note = N1-methylpseudouracil
  modified_base 1070: mod_base = OTHER; note = N1-methylpseudouracil
  modified_base 1073: mod_base = OTHER; note = N1-methylpseudouracil
  modified_base 1076: mod_base = OTHER; note = N1-methylpseudouracil
  modified_base 1085: mod_base = OTHER; note = N1-methylpseudouracil
  modified_base 1087: mod_base = OTHER; note = N1-methylpseudouracil
  modified_base 1088: mod_base = OTHER; note = N1-methylpseudouracil
  modified_base 1097: mod_base = OTHER; note = N1-methylpseudouracil
  modified_base 1098: mod_base = OTHER; note = N1-methylpseudouracil
  modified_base 1102: mod_base = OTHER; note = N1-methylpseudouracil
  modified_base 1103: mod_base = OTHER; note = N1-methylpseudouracil
  modified_base 1105: mod_base = OTHER; note = N1-methylpseudouracil
  modified_base 1109: mod_base = OTHER; note = N1-methylpseudouracil
  modified_base 1112: mod_base = OTHER; note = N1-methylpseudouracil
  modified_base 1115: mod_base = OTHER; note = N1-methylpseudouracil
  modified_base 1121: mod_base = OTHER; note = N1-methylpseudouracil
  modified_base 1127: mod_base = OTHER; note = N1-methylpseudouracil
  modified_base 1138: mod_base = OTHER; note = N1-methylpseudouracil
  modified_base 1139: mod_base = OTHER; note = N1-methylpseudouracil
  modified_base 1143: mod_base = OTHER; note = N1-methylpseudouracil
  modified_base 1144: mod_base = OTHER; note = N1-methylpseudouracil
  modified_base 1151: mod_base = OTHER; note = N1-methylpseudouracil
  modified_base 1158: mod_base = OTHER; note = N1-methylpseudouracil
  modified_base 1159: mod_base = OTHER; note = N1-methylpseudouracil
  modified_base 1162: mod_base = OTHER; note = N1-methylpseudouracil
  modified_base 1172: mod_base = OTHER; note = N1-methylpseudouracil
  modified_base 1181: mod_base = OTHER; note = N1-methylpseudouracil
  modified_base 1190: mod_base = OTHER; note = N1-methylpseudouracil
  modified_base 1198: mod_base = OTHER; note = N1-methylpseudouracil
  modified_base 1199: mod_base = OTHER; note = N1-methylpseudouracil
  modified_base 1200: mod_base = OTHER; note = N1-methylpseudouracil
  modified_base 1202: mod_base = OTHER; note = N1-methylpseudouracil
  modified_base 1216: mod_base = OTHER; note = N1-methylpseudouracil
  modified_base 1218: mod_base = OTHER; note = N1-methylpseudouracil
  modified_base 1226: mod_base = OTHER; note = N1-methylpseudouracil
  modified_base 1231: mod_base = OTHER; note = N1-methylpseudouracil
  modified_base 1238: mod_base = OTHER; note = N1-methylpseudouracil
  modified_base 1253: mod_base = OTHER; note = N1-methylpseudouracil
  modified_base 1256: mod_base = OTHER; note = N1-methylpseudouracil
  modified_base 1259: mod_base = OTHER; note = N1-methylpseudouracil
  modified_base 1268: mod_base = OTHER; note = N1-methylpseudouracil
  modified_base 1276: mod_base = OTHER; note = N1-methylpseudouracil
  modified_base 1277: mod_base = OTHER; note = N1-methylpseudouracil
  modified_base 1279: mod_base = OTHER; note = N1-methylpseudouracil
  modified_base 1289: mod_base = OTHER; note = N1-methylpseudouracil
  modified_base 1299: mod_base = OTHER; note = N1-methylpseudouracil
  modified_base 1301: mod_base = OTHER; note = N1-methylpseudouracil
  modified_base 1304: mod_base = OTHER; note = N1-methylpseudouracil
  modified_base 1313: mod_base = OTHER; note = N1-methylpseudouracil
  modified_base 1318: mod_base = OTHER; note = N1-methylpseudouracil
  modified_base 1319: mod_base = OTHER; note = N1-methylpseudouracil
  modified_base 1325: mod_base = OTHER; note = N1-methylpseudouracil
  modified_base 1340: mod_base = OTHER; note = N1-methylpseudouracil
  modified_base 1343: mod_base = OTHER; note = N1-methylpseudouracil
  modified_base 1349: mod_base = OTHER; note = N1-methylpseudouracil
  modified_base 1357: mod_base = OTHER; note = N1-methylpseudouracil
  modified_base 1359: mod_base = OTHER; note = N1-methylpseudouracil
  modified_base 1382: mod_base = OTHER; note = N1-methylpseudouracil
  modified_base 1385: mod_base = OTHER; note = N1-methylpseudouracil
  modified_base 1388: mod_base = OTHER; note = N1-methylpseudouracil
  modified_base 1391: mod_base = OTHER; note = N1-methylpseudouracil
  modified_base 1394: mod_base = OTHER; note = N1-methylpseudouracil
  modified_base 1397: mod_base = OTHER; note = N1-methylpseudouracil
  modified_base 1406: mod_base = OTHER; note = N1-methylpseudouracil
  modified_base 1427: mod_base = OTHER; note = N1-methylpseudouracil
  modified_base 1445: mod_base = OTHER; note = N1-methylpseudouracil
  modified_base 1447: mod_base = OTHER; note = N1-methylpseudouracil
  modified_base 1450: mod_base = OTHER; note = N1-methylpseudouracil
  modified_base 1451: mod_base = OTHER; note = N1-methylpseudouracil
  modified_base 1453: mod_base = OTHER; note = N1-methylpseudouracil
  modified_base 1462: mod_base = OTHER; note = N1-methylpseudouracil
  modified_base 1463: mod_base = OTHER; note = N1-methylpseudouracil
  modified_base 1465: mod_base = OTHER; note = N1-methylpseudouracil
  modified_base 1468: mod_base = OTHER; note = N1-methylpseudouracil
  modified_base 1472: mod_base = OTHER; note = N1-methylpseudouracil
  modified_base 1475: mod_base = OTHER; note = N1-methylpseudouracil
  modified_base 1487: mod_base = OTHER; note = N1-methylpseudouracil
  modified_base 1499: mod_base = OTHER; note = N1-methylpseudouracil
  modified_base 1502: mod_base = OTHER; note = N1-methylpseudouracil
  modified_base 1504: mod_base = OTHER; note = N1-methylpseudouracil
  modified_base 1505: mod_base = OTHER; note = N1-methylpseudouracil
  modified_base 1511: mod_base = OTHER; note = N1-methylpseudouracil
  modified_base 1516: mod_base = OTHER; note = N1-methylpseudouracil
  modified_base 1525: mod_base = OTHER; note = N1-methylpseudouracil
  modified_base 1531: mod_base = OTHER; note = N1-methylpseudouracil
  modified_base 1541: mod_base = OTHER; note = N1-methylpseudouracil
  modified_base 1544: mod_base = OTHER; note = N1-methylpseudouracil
  modified_base 1552: mod_base = OTHER; note = N1-methylpseudouracil
  modified_base 1559: mod_base = OTHER; note = N1-methylpseudouracil
  modified_base 1571: mod_base = OTHER; note = N1-methylpseudouracil
  modified_base 1573: mod_base = OTHER; note = N1-methylpseudouracil
  modified_base 1579: mod_base = OTHER; note = N1-methylpseudouracil
  modified_base 1580: mod_base = OTHER; note = N1-methylpseudouracil
  modified_base 1581: mod_base = OTHER; note = N1-methylpseudouracil
  modified_base 1601: mod_base = OTHER; note = N1-methylpseudouracil
  modified_base 1604: mod_base = OTHER; note = N1-methylpseudouracil
  modified_base 1619: mod_base = OTHER; note = N1-methylpseudouracil
  modified_base 1625: mod_base = OTHER; note = N1-methylpseudouracil
  modified_base 1627: mod_base = OTHER; note = N1-methylpseudouracil
  modified_base 1632: mod_base = OTHER; note = N1-methylpseudouracil
  modified_base 1641: mod_base = OTHER; note = N1-methylpseudouracil
  modified_base 1649: mod_base = OTHER; note = N1-methylpseudouracil
  modified_base 1651: mod_base = OTHER; note = N1-methylpseudouracil
  modified_base 1655: mod_base = OTHER; note = N1-methylpseudouracil
  modified_base 1665: mod_base = OTHER; note = N1-methylpseudouracil
  modified_base 1667: mod_base = OTHER; note = N1-methylpseudouracil
  modified_base 1669: mod_base = OTHER; note = N1-methylpseudouracil
  modified_base 1685: mod_base = OTHER; note = N1-methylpseudouracil
  modified_base 1687: mod_base = OTHER; note = N1-methylpseudouracil
  modified_base 1691: mod_base = OTHER; note = N1-methylpseudouracil
  modified_base 1694: mod_base = OTHER; note = N1-methylpseudouracil
  modified_base 1704: mod_base = OTHER; note = N1-methylpseudouracil
  modified_base 1705: mod_base = OTHER; note = N1-methylpseudouracil
  modified_base 1706: mod_base = OTHER; note = N1-methylpseudouracil
  modified_base 1707: mod_base = OTHER; note = N1-methylpseudouracil
  modified_base 1711: mod_base = OTHER; note = N1-methylpseudouracil
  modified_base 1715: mod_base = OTHER; note = N1-methylpseudouracil
  modified_base 1721: mod_base = OTHER; note = N1-methylpseudouracil
  modified_base 1724: mod_base = OTHER; note = N1-methylpseudouracil
  modified_base 1739: mod_base = OTHER; note = N1-methylpseudouracil
  modified_base 1741: mod_base = OTHER; note = N1-methylpseudouracil
  modified_base 1742: mod_base = OTHER; note = N1-methylpseudouracil
  modified_base 1747: mod_base = OTHER; note = N1-methylpseudouracil
  modified_base 1750: mod_base = OTHER; note = N1-methylpseudouracil
  modified_base 1754: mod_base = OTHER; note = N1-methylpseudouracil
  modified_base 1756: mod_base = OTHER; note = N1-methylpseudouracil
  modified_base 1758: mod_base = OTHER; note = N1-methylpseudouracil
  modified_base 1763: mod_base = OTHER; note = N1-methylpseudouracil
  modified_base 1766: mod_base = OTHER; note = N1-methylpseudouracil
  modified_base 1784: mod_base = OTHER; note = N1-methylpseudouracil
  modified_base 1787: mod_base = OTHER; note = N1-methylpseudouracil
  modified_base 1790: mod_base = OTHER; note = N1-methylpseudouracil
  modified_base 1802: mod_base = OTHER; note = N1-methylpseudouracil
  modified_base 1809: mod_base = OTHER; note = N1-methylpseudouracil
  modified_base 1811: mod_base = OTHER; note = N1-methylpseudouracil
  modified_base 1829: mod_base = OTHER; note = N1-methylpseudouracil
  modified_base 1832: mod_base = OTHER; note = N1-methylpseudouracil
  modified_base 1835: mod_base = OTHER; note = N1-methylpseudouracil
  modified_base 1838: mod_base = OTHER; note = N1-methylpseudouracil
  modified_base 1849: mod_base = OTHER; note = N1-methylpseudouracil
  modified_base 1855: mod_base = OTHER; note = N1-methylpseudouracil
  modified_base 1858: mod_base = OTHER; note = N1-methylpseudouracil
  modified_base 1859: mod_base = OTHER; note = N1-methylpseudouracil
  modified_base 1861: mod_base = OTHER; note = N1-methylpseudouracil
  modified_base 1870: mod_base = OTHER; note = N1-methylpseudouracil
  modified_base 1871: mod_base = OTHER; note = N1-methylpseudouracil
  modified_base 1880: mod_base = OTHER; note = N1-methylpseudouracil
  modified_base 1889: mod_base = OTHER; note = N1-methylpseudouracil
  modified_base 1900: mod_base = OTHER; note = N1-methylpseudouracil
  modified_base 1901: mod_base = OTHER; note = N1-methylpseudouracil
  modified_base 1906: mod_base = OTHER; note = N1-methylpseudouracil
  modified_base 1913: mod_base = OTHER; note = N1-methylpseudouracil
  modified_base 1916: mod_base = OTHER; note = N1-methylpseudouracil
  modified_base 1921: mod_base = OTHER; note = N1-methylpseudouracil
  modified_base 1926: mod_base = OTHER; note = N1-methylpseudouracil
  modified_base 1930: mod_base = OTHER; note = N1-methylpseudouracil
  modified_base 1931: mod_base = OTHER; note = N1-methylpseudouracil
  modified_base 1939: mod_base = OTHER; note = N1-methylpseudouracil
  modified_base 1940: mod_base = OTHER; note = N1-methylpseudouracil
  modified_base 1942: mod_base = OTHER; note = N1-methylpseudouracil
  modified_base 1960: mod_base = OTHER; note = N1-methylpseudouracil
  modified_base 1964: mod_base = OTHER; note = N1-methylpseudouracil
  modified_base 1965: mod_base = OTHER; note = N1-methylpseudouracil
  modified_base 1967: mod_base = OTHER; note = N1-methylpseudouracil
  modified_base 1979: mod_base = OTHER; note = N1-methylpseudouracil
  modified_base 1987: mod_base = OTHER; note = N1-methylpseudouracil
  modified_base 1988: mod_base = OTHER; note = N1-methylpseudouracil
  modified_base 1990: mod_base = OTHER; note = N1-methylpseudouracil
  modified_base 1994: mod_base = OTHER; note = N1-methylpseudouracil
  modified_base 2012: mod_base = OTHER; note = N1-methylpseudouracil
  modified_base 2017: mod_base = OTHER; note = N1-methylpseudouracil
  modified_base 2041: mod_base = OTHER; note = N1-methylpseudouracil
  modified_base 2042: mod_base = OTHER; note = N1-methylpseudouracil
  modified_base 2059: mod_base = OTHER; note = N1-methylpseudouracil
  modified_base 2060: mod_base = OTHER; note = N1-methylpseudouracil
  modified_base 2080: mod_base = OTHER; note = N1-methylpseudouracil
  modified_base 2084: mod_base = OTHER; note = N1-methylpseudouracil
  modified_base 2087: mod_base = OTHER; note = N1-methylpseudouracil
  modified_base 2096: mod_base = OTHER; note = N1-methylpseudouracil
  modified_base 2105: mod_base = OTHER; note = N1-methylpseudouracil
  modified_base 2113: mod_base = OTHER; note = N1-methylpseudouracil
  modified_base 2114: mod_base = OTHER; note = N1-methylpseudouracil
  modified_base 2120: mod_base = OTHER; note = N1-methylpseudouracil
  modified_base 2123: mod_base = OTHER; note = N1-methylpseudouracil
  modified_base 2136: mod_base = OTHER; note = N1-methylpseudouracil
  modified_base 2138: mod_base = OTHER; note = N1-methylpseudouracil
  modified_base 2144: mod_base = OTHER; note = N1-methylpseudouracil
  modified_base 2153: mod_base = OTHER; note = N1-methylpseudouracil
  modified_base 2177: mod_base = OTHER; note = N1-methylpseudouracil
  modified_base 2189: mod_base = OTHER; note = N1-methylpseudouracil
  modified_base 2191: mod_base = OTHER; note = N1-methylpseudouracil
  modified_base 2195: mod_base = OTHER; note = N1-methylpseudouracil
  modified_base 2198: mod_base = OTHER; note = N1-methylpseudouracil
  modified_base 2225: mod_base = OTHER; note = N1-methylpseudouracil
  modified_base 2228: mod_base = OTHER; note = N1-methylpseudouracil
  modified_base 2237: mod_base = OTHER; note = N1-methylpseudouracil
  modified_base 2239: mod_base = OTHER; note = N1-methylpseudouracil
  modified_base 2243: mod_base = OTHER; note = N1-methylpseudouracil
  modified_base 2246: mod_base = OTHER; note = N1-methylpseudouracil
  modified_base 2248: mod_base = OTHER; note = N1-methylpseudouracil
  modified_base 2253: mod_base = OTHER; note = N1-methylpseudouracil
  modified_base 2264: mod_base = OTHER; note = N1-methylpseudouracil
  modified_base 2288: mod_base = OTHER; note = N1-methylpseudouracil
  modified_base 2291: mod_base = OTHER; note = N1-methylpseudouracil
  modified_base 2297: mod_base = OTHER; note = N1-methylpseudouracil
  modified_base 2300: mod_base = OTHER; note = N1-methylpseudouracil
  modified_base 2312: mod_base = OTHER; note = N1-methylpseudouracil
  modified_base 2328: mod_base = OTHER; note = N1-methylpseudouracil
  modified_base 2330: mod_base = OTHER; note = N1-methylpseudouracil
  modified_base 2343: mod_base = OTHER; note = N1-methylpseudouracil
  modified_base 2363: mod_base = OTHER; note = N1-methylpseudouracil
  modified_base 2369: mod_base = OTHER; note = N1-methylpseudouracil
  modified_base 2373: mod_base = OTHER; note = N1-methylpseudouracil
  modified_base 2387: mod_base = OTHER; note = N1-methylpseudouracil
  modified_base 2396: mod_base = OTHER; note = N1-methylpseudouracil
  modified_base 2402: mod_base = OTHER; note = N1-methylpseudouracil
  modified_base 2404: mod_base = OTHER; note = N1-methylpseudouracil
  modified_base 2417: mod_base = OTHER; note = N1-methylpseudouracil
  modified_base 2435: mod_base = OTHER; note = N1-methylpseudouracil
  modified_base 2441: mod_base = OTHER; note = N1-methylpseudouracil
  modified_base 2453: mod_base = OTHER; note = N1-methylpseudouracil
  modified_base 2468: mod_base = OTHER; note = N1-methylpseudouracil
  modified_base 2476: mod_base = OTHER; note = N1-methylpseudouracil
  modified_base 2479: mod_base = OTHER; note = N1-methylpseudouracil
  modified_base 2480: mod_base = OTHER; note = N1-methylpseudouracil
  modified_base 2482: mod_base = OTHER; note = N1-methylpseudouracil
  modified_base 2483: mod_base = OTHER; note = N1-methylpseudouracil
  modified_base 2492: mod_base = OTHER; note = N1-methylpseudouracil
  modified_base 2497: mod_base = OTHER; note = N1-methylpseudouracil
  modified_base 2501: mod_base = OTHER; note = N1-methylpseudouracil
  modified_base 2510: mod_base = OTHER; note = N1-methylpseudouracil
  modified_base 2518: mod_base = OTHER; note = N1-methylpseudouracil
  modified_base 2527: mod_base = OTHER; note = N1-methylpseudouracil
  modified_base 2531: mod_base = OTHER; note = N1-methylpseudouracil
  modified_base 2536: mod_base = OTHER; note = N1-methylpseudouracil
  modified_base 2540: mod_base = OTHER; note = N1-methylpseudouracil
  modified_base 2546: mod_base = OTHER; note = N1-methylpseudouracil
  modified_base 2558: mod_base = OTHER; note = N1-methylpseudouracil
  modified_base 2561: mod_base = OTHER; note = N1-methylpseudouracil
  modified_base 2563: mod_base = OTHER; note = N1-methylpseudouracil
  modified_base 2564: mod_base = OTHER; note = N1-methylpseudouracil
  modified_base 2567: mod_base = OTHER; note = N1-methylpseudouracil
  modified_base 2570: mod_base = OTHER; note = N1-methylpseudouracil
  modified_base 2573: mod_base = OTHER; note = N1-methylpseudouracil
  modified_base 2575: mod_base = OTHER; note = N1-methylpseudouracil
  modified_base 2578: mod_base = OTHER; note = N1-methylpseudouracil
  modified_base 2582: mod_base = OTHER; note = N1-methylpseudouracil
  modified_base 2585: mod_base = OTHER; note = N1-methylpseudouracil
  modified_base 2588: mod_base = OTHER; note = N1-methylpseudouracil
  modified_base 2590: mod_base = OTHER; note = N1-methylpseudouracil
  modified_base 2591: mod_base = OTHER; note = N1-methylpseudouracil
  modified_base 2593: mod_base = OTHER; note = N1-methylpseudouracil
  modified_base 2594: mod_base = OTHER; note = N1-methylpseudouracil
  modified_base 2603: mod_base = OTHER; note = N1-methylpseudouracil
  modified_base 2611: mod_base = OTHER; note = N1-methylpseudouracil
  modified_base 2615: mod_base = OTHER; note = N1-methylpseudouracil
  modified_base 2618: mod_base = OTHER; note = N1-methylpseudouracil
  modified_base 2621: mod_base = OTHER; note = N1-methylpseudouracil
  modified_base 2624: mod_base = OTHER; note = N1-methylpseudouracil
  modified_base 2626: mod_base = OTHER; note = N1-methylpseudouracil
  modified_base 2630: mod_base = OTHER; note = N1-methylpseudouracil
  modified_base 2633: mod_base = OTHER; note = N1-methylpseudouracil
  modified_base 2640: mod_base = OTHER; note = N1-methylpseudouracil
  modified_base 2648: mod_base = OTHER; note = N1-methylpseudouracil
  modified_base 2665: mod_base = OTHER; note = N1-methylpseudouracil
  modified_base 2689: mod_base = OTHER; note = N1-methylpseudouracil
  modified_base 2696: mod_base = OTHER; note = N1-methylpseudouracil
  modified_base 2699: mod_base = OTHER; note = N1-methylpseudouracil
  modified_base 2702: mod_base = OTHER; note = N1-methylpseudouracil
  modified_base 2707: mod_base = OTHER; note = N1-methylpseudouracil
  modified_base 2719: mod_base = OTHER; note = N1-methylpseudouracil
  modified_base 2722: mod_base = OTHER; note = N1-methylpseudouracil
  modified_base 2726: mod_base = OTHER; note = N1-methylpseudouracil
  modified_base 2728: mod_base = OTHER; note = N1-methylpseudouracil
  modified_base 2729: mod_base = OTHER; note = N1-methylpseudouracil
  modified_base 2731: mod_base = OTHER; note = N1-methylpseudouracil
  modified_base 2735: mod_base = OTHER; note = N1-methylpseudouracil
  modified_base 2737: mod_base = OTHER; note = N1-methylpseudouracil
  modified_base 2741: mod_base = OTHER; note = N1-methylpseudouracil
  modified_base 2747: mod_base = OTHER; note = N1-methylpseudouracil
  modified_base 2759: mod_base = OTHER; note = N1-methylpseudouracil
  modified_base 2762: mod_base = OTHER; note = N1-methylpseudouracil
  modified_base 2768: mod_base = OTHER; note = N1-methylpseudouracil
  modified_base 2773: mod_base = OTHER; note = N1-methylpseudouracil
  modified_base 2774: mod_base = OTHER; note = N1-methylpseudouracil
  modified_base 2776: mod_base = OTHER; note = N1-methylpseudouracil
  modified_base 2777: mod_base = OTHER; note = N1-methylpseudouracil
  modified_base 2786: mod_base = OTHER; note = N1-methylpseudouracil
  modified_base 2790: mod_base = OTHER; note = N1-methylpseudouracil
  modified_base 2792: mod_base = OTHER; note = N1-methylpseudouracil
  modified_base 2795: mod_base = OTHER; note = N1-methylpseudouracil
  modified_base 2804: mod_base = OTHER; note = N1-methylpseudouracil
  modified_base 2807: mod_base = OTHER; note = N1-methylpseudouracil
  modified_base 2813: mod_base = OTHER; note = N1-methylpseudouracil
  modified_base 2822: mod_base = OTHER; note = N1-methylpseudouracil
  modified_base 2825: mod_base = OTHER; note = N1-methylpseudouracil
  modified_base 2837: mod_base = OTHER; note = N1-methylpseudouracil
  modified_base 2840: mod_base = OTHER; note = N1-methylpseudouracil
  modified_base 2849: mod_base = OTHER; note = N1-methylpseudouracil
  modified_base 2852: mod_base = OTHER; note = N1-methylpseudouracil
  modified_base 2859: mod_base = OTHER; note = N1-methylpseudouracil
  modified_base 2864: mod_base = OTHER; note = N1-methylpseudouracil
  modified_base 2866: mod_base = OTHER; note = N1-methylpseudouracil
  modified_base 2873: mod_base = OTHER; note = N1-methylpseudouracil
  modified_base 2882: mod_base = OTHER; note = N1-methylpseudouracil
  modified_base 2897: mod_base = OTHER; note = N1-methylpseudouracil
  modified_base 2900: mod_base = OTHER; note = N1-methylpseudouracil
  modified_base 2908: mod_base = OTHER; note = N1-methylpseudouracil
  modified_base 2909: mod_base = OTHER; note = N1-methylpseudouracil
  modified_base 2921: mod_base = OTHER; note = N1-methylpseudouracil
  modified_base 2927: mod_base = OTHER; note = N1-methylpseudouracil
  modified_base 2928: mod_base = OTHER; note = N1-methylpseudouracil
  modified_base 2930: mod_base = OTHER; note = N1-methylpseudouracil
  modified_base 2937: mod_base = OTHER; note = N1-methylpseudouracil
  modified_base 2939: mod_base = OTHER; note = N1-methylpseudouracil
  modified_base 2942: mod_base = OTHER; note = N1-methylpseudouracil
  modified_base 2948: mod_base = OTHER; note = N1-methylpseudouracil
  modified_base 2954: mod_base = OTHER; note = N1-methylpseudouracil
  modified_base 2956: mod_base = OTHER; note = N1-methylpseudouracil
  modified_base 2957: mod_base = OTHER; note = N1-methylpseudouracil
  modified_base 2962: mod_base = OTHER; note = N1-methylpseudouracil
  modified_base 2963: mod_base = OTHER; note = N1-methylpseudouracil
  modified_base 2966: mod_base = OTHER; note = N1-methylpseudouracil
  modified_base 2972: mod_base = OTHER; note = N1-methylpseudouracil
  modified_base 2975: mod_base = OTHER; note = N1-methylpseudouracil
  modified_base 2978: mod_base = OTHER; note = N1-methylpseudouracil
  modified_base 2981: mod_base = OTHER; note = N1-methylpseudouracil
  modified_base 2984: mod_base = OTHER; note = N1-methylpseudouracil
  modified_base 2987: mod_base = OTHER; note = N1-methylpseudouracil
  modified_base 2996: mod_base = OTHER; note = N1-methylpseudouracil
  modified_base 3002: mod_base = OTHER; note = N1-methylpseudouracil
  modified_base 3005: mod_base = OTHER; note = N1-methylpseudouracil
  modified_base 3011: mod_base = OTHER; note = N1-methylpseudouracil
  modified_base 3014: mod_base = OTHER; note = N1-methylpseudouracil
  modified_base 3022: mod_base = OTHER; note = N1-methylpseudouracil
  modified_base 3026: mod_base = OTHER; note = N1-methylpseudouracil
  modified_base 3028: mod_base = OTHER; note = N1-methylpseudouracil
  modified_base 3029: mod_base = OTHER; note = N1-methylpseudouracil
  modified_base 3032: mod_base = OTHER; note = N1-methylpseudouracil
  modified_base 3041: mod_base = OTHER; note = N1-methylpseudouracil
  modified_base 3047: mod_base = OTHER; note = N1-methylpseudouracil
  modified_base 3050: mod_base = OTHER; note = N1-methylpseudouracil
  modified_base 3053: mod_base = OTHER; note = N1-methylpseudouracil
  modified_base 3058: mod_base = OTHER; note = N1-methylpseudouracil
  modified_base 3059: mod_base = OTHER; note = N1-methylpseudouracil
  modified_base 3062: mod_base = OTHER; note = N1-methylpseudouracil
  modified_base 3065: mod_base = OTHER; note = N1-methylpseudouracil
  modified_base 3068: mod_base = OTHER; note = N1-methylpseudouracil
  modified_base 3076: mod_base = OTHER; note = N1-methylpseudouracil
  modified_base 3079: mod_base = OTHER; note = N1-methylpseudouracil
  modified_base 3080: mod_base = OTHER; note = N1-methylpseudouracil
  modified_base 3083: mod_base = OTHER; note = N1-methylpseudouracil
  modified_base 3091: mod_base = OTHER; note = N1-methylpseudouracil
  modified_base 3101: mod_base = OTHER; note = N1-methylpseudouracil
  modified_base 3110: mod_base = OTHER; note = N1-methylpseudouracil
  modified_base 3134: mod_base = OTHER; note = N1-methylpseudouracil
  modified_base 3136: mod_base = OTHER; note = N1-methylpseudouracil
  modified_base 3137: mod_base = OTHER; note = N1-methylpseudouracil
  modified_base 3146: mod_base = OTHER; note = N1-methylpseudouracil
  modified_base 3149: mod_base = OTHER; note = N1-methylpseudouracil
  modified_base 3153: mod_base = OTHER; note = N1-methylpseudouracil
  modified_base 3158: mod_base = OTHER; note = N1-methylpseudouracil
  modified_base 3167: mod_base = OTHER; note = N1-methylpseudouracil
  modified_base 3169: mod_base = OTHER; note = N1-methylpseudouracil
  modified_base 3176: mod_base = OTHER; note = N1-methylpseudouracil
  modified_base 3184: mod_base = OTHER; note = N1-methylpseudouracil
  modified_base 3185: mod_base = OTHER; note = N1-methylpseudouracil
  modified_base 3199: mod_base = OTHER; note = N1-methylpseudouracil
  modified_base 3202: mod_base = OTHER; note = N1-methylpseudouracil
  modified_base 3203: mod_base = OTHER; note = N1-methylpseudouracil
  modified_base 3212: mod_base = OTHER; note = N1-methylpseudouracil
  modified_base 3214: mod_base = OTHER; note = N1-methylpseudouracil
  modified_base 3215: mod_base = OTHER; note = N1-methylpseudouracil
  modified_base 3225: mod_base = OTHER; note = N1-methylpseudouracil
  modified_base 3227: mod_base = OTHER; note = N1-methylpseudouracil
  modified_base 3233: mod_base = OTHER; note = N1-methylpseudouracil
  modified_base 3247: mod_base = OTHER; note = N1-methylpseudouracil
  modified_base 3250: mod_base = OTHER; note = N1-methylpseudouracil
  modified_base 3251: mod_base = OTHER; note = N1-methylpseudouracil
  modified_base 3254: mod_base = OTHER; note = N1-methylpseudouracil
  modified_base 3256: mod_base = OTHER; note = N1-methylpseudouracil
  modified_base 3260: mod_base = OTHER; note = N1-methylpseudouracil
  modified_base 3269: mod_base = OTHER; note = N1-methylpseudouracil
  modified_base 3274: mod_base = OTHER; note = N1-methylpseudouracil
  modified_base 3277: mod_base = OTHER; note = N1-methylpseudouracil
  modified_base 3278: mod_base = OTHER; note = N1-methylpseudouracil
  modified_base 3284: mod_base = OTHER; note = N1-methylpseudouracil
  modified_base 3290: mod_base = OTHER; note = N1-methylpseudouracil
  modified_base 3296: mod_base = OTHER; note = N1-methylpseudouracil
  modified_base 3299: mod_base = OTHER; note = N1-methylpseudouracil
  modified_base 3301: mod_base = OTHER; note = N1-methylpseudouracil
  modified_base 3302: mod_base = OTHER; note = N1-methylpseudouracil
  modified_base 3305: mod_base = OTHER; note = N1-methylpseudouracil
  modified_base 3308: mod_base = OTHER; note = N1-methylpseudouracil
  modified_base 3310: mod_base = OTHER; note = N1-methylpseudouracil
  modified_base 3311: mod_base = OTHER; note = N1-methylpseudouracil
  modified_base 3313: mod_base = OTHER; note = N1-methylpseudouracil
  modified_base 3314: mod_base = OTHER; note = N1-methylpseudouracil
  modified_base 3317: mod_base = OTHER; note = N1-methylpseudouracil
  modified_base 3323: mod_base = OTHER; note = N1-methylpseudouracil
  modified_base 3328: mod_base = OTHER; note = N1-methylpseudouracil
  modified_base 3329: mod_base = OTHER; note = N1-methylpseudouracil
  modified_base 3332: mod_base = OTHER; note = N1-methylpseudouracil
  modified_base 3334: mod_base = OTHER; note = N1-methylpseudouracil
  modified_base 3338: mod_base = OTHER; note = N1-methylpseudouracil
  modified_base 3341: mod_base = OTHER; note = N1-methylpseudouracil
  modified_base 3368: mod_base = OTHER; note = N1-methylpseudouracil
  modified_base 3374: mod_base = OTHER; note = N1-methylpseudouracil
  modified_base 3377: mod_base = OTHER; note = N1-methylpseudouracil
  modified_base 3380: mod_base = OTHER; note = N1-methylpseudouracil
  modified_base 3386: mod_base = OTHER; note = N1-methylpseudouracil
  modified_base 3392: mod_base = OTHER; note = N1-methylpseudouracil
  modified_base 3396: mod_base = OTHER; note = N1-methylpseudouracil
  modified_base 3398: mod_base = OTHER; note = N1-methylpseudouracil
  modified_base 3401: mod_base = OTHER; note = N1-methylpseudouracil
  modified_base 3410: mod_base = OTHER; note = N1-methylpseudouracil
  modified_base 3415: mod_base = OTHER; note = N1-methylpseudouracil
  modified_base 3422: mod_base = OTHER; note = N1-methylpseudouracil
  modified_base 3434: mod_base = OTHER; note = N1-methylpseudouracil
  modified_base 3440: mod_base = OTHER; note = N1-methylpseudouracil
  modified_base 3449: mod_base = OTHER; note = N1-methylpseudouracil
  modified_base 3452: mod_base = OTHER; note = N1-methylpseudouracil
  modified_base 3457: mod_base = OTHER; note = N1-methylpseudouracil
  modified_base 3461: mod_base = OTHER; note = N1-methylpseudouracil
  modified_base 3463: mod_base = OTHER; note = N1-methylpseudouracil
  modified_base 3470: mod_base = OTHER; note = N1-methylpseudouracil
  modified_base 3472: mod_base = OTHER; note = N1-methylpseudouracil
  modified_base 3473: mod_base = OTHER; note = N1-methylpseudouracil
  modified_base 3478: mod_base = OTHER; note = N1-methylpseudouracil
  modified_base 3479: mod_base = OTHER; note = N1-methylpseudouracil
  modified_base 3482: mod_base = OTHER; note = N1-methylpseudouracil
  modified_base 3488: mod_base = OTHER; note = N1-methylpseudouracil
  modified_base 3526: mod_base = OTHER; note = N1-methylpseudouracil
  modified_base 3542: mod_base = OTHER; note = N1-methylpseudouracil
  modified_base 3551: mod_base = OTHER; note = N1-methylpseudouracil
  modified_base 3554: mod_base = OTHER; note = N1-methylpseudouracil
  modified_base 3557: mod_base = OTHER; note = N1-methylpseudouracil
  modified_base 3558: mod_base = OTHER; note = N1-methylpseudouracil
  modified_base 3560: mod_base = OTHER; note = N1-methylpseudouracil
  modified_base 3575: mod_base = OTHER; note = N1-methylpseudouracil
  modified_base 3590: mod_base = OTHER; note = N1-methylpseudouracil
  modified_base 3592: mod_base = OTHER; note = N1-methylpseudouracil
  modified_base 3597: mod_base = OTHER; note = N1-methylpseudouracil
  modified_base 3598: mod_base = OTHER; note = N1-methylpseudouracil
  modified_base 3611: mod_base = OTHER; note = N1-methylpseudouracil
  modified_base 3617: mod_base = OTHER; note = N1-methylpseudouracil
  modified_base 3626: mod_base = OTHER; note = N1-methylpseudouracil
  modified_base 3637: mod_base = OTHER; note = N1-methylpseudouracil
  modified_base 3659: mod_base = OTHER; note = N1-methylpseudouracil
  modified_base 3662: mod_base = OTHER; note = N1-methylpseudouracil
  modified_base 3671: mod_base = OTHER; note = N1-methylpseudouracil
  modified_base 3676: mod_base = OTHER; note = N1-methylpseudouracil
  modified_base 3677: mod_base = OTHER; note = N1-methylpseudouracil
  modified_base 3679: mod_base = OTHER; note = N1-methylpseudouracil
  modified_base 3683: mod_base = OTHER; note = N1-methylpseudouracil
  modified_base 3684: mod_base = OTHER; note = N1-methylpseudouracil
  modified_base 3690: mod_base = OTHER; note = N1-methylpseudouracil
  modified_base 3701: mod_base = OTHER; note = N1-methylpseudouracil
  modified_base 3707: mod_base = OTHER; note = N1-methylpseudouracil
  modified_base 3709: mod_base = OTHER; note = N1-methylpseudouracil
  modified_base 3710: mod_base = OTHER; note = N1-methylpseudouracil
  modified_base 3726: mod_base = OTHER; note = N1-methylpseudouracil
  modified_base 3740: mod_base = OTHER; note = N1-methylpseudouracil
  modified_base 3743: mod_base = OTHER; note = N1-methylpseudouracil
  modified_base 3745: mod_base = OTHER; note = N1-methylpseudouracil
  modified_base 3751: mod_base = OTHER; note = N1-methylpseudouracil
  modified_base 3752: mod_base = OTHER; note = N1-methylpseudouracil
  modified_base 3755: mod_base = OTHER; note = N1-methylpseudouracil
  modified_base 3761: mod_base = OTHER; note = N1-methylpseudouracil
  modified_base 3764: mod_base = OTHER; note = N1-methylpseudouracil
  modified_base 3782: mod_base = OTHER; note = N1-methylpseudouracil
  modified_base 3788: mod_base = OTHER; note = N1-methylpseudouracil
  modified_base 3797: mod_base = OTHER; note = N1-methylpseudouracil
  modified_base 3802: mod_base = OTHER; note = N1-methylpseudouracil
  modified_base 3812: mod_base = OTHER; note = N1-methylpseudouracil
  modified_base 3818: mod_base = OTHER; note = N1-methylpseudouracil
  modified_base 3826: mod_base = OTHER; note = N1-methylpseudouracil
  modified_base 3838: mod_base = OTHER; note = N1-methylpseudouracil
  modified_base 3839: mod_base = OTHER; note = N1-methylpseudouracil
  modified_base 3845: mod_base = OTHER; note = N1-methylpseudouracil
  modified_base 3848: mod_base = OTHER; note = N1-methylpseudouracil
  modified_base 3860: mod_base = OTHER; note = N1-methylpseudouracil
  modified_base 3862: mod_base = OTHER; note = N1-methylpseudouracil
  modified_base 3863: mod_base = OTHER; note = N1-methylpseudouracil
  modified_base 3864: mod_base = OTHER; note = N1-methylpseudouracil
  modified_base 3866: mod_base = OTHER; note = N1-methylpseudouracil
  modified_base 3867: mod_base = OTHER; note = N1-methylpseudouracil
  modified_base 3868: mod_base = OTHER; note = N1-methylpseudouracil
  modified_base 3869: mod_base = OTHER; note = N1-methylpseudouracil
  modified_base 3871: mod_base = OTHER; note = N1-methylpseudouracil
  modified_base 3873: mod_base = OTHER; note = N1-methylpseudouracil
  modified_base 3880: mod_base = OTHER; note = N1-methylpseudouracil
  modified_base 3881: mod_base = OTHER; note = N1-methylpseudouracil
  modified_base 3882: mod_base = OTHER; note = N1-methylpseudouracil
  modified_base 3893: mod_base = OTHER; note = N1-methylpseudouracil
  modified_base 3901: mod_base = OTHER; note = N1-methylpseudouracil
  modified_base 3910: mod_base = OTHER; note = N1-methylpseudouracil
  modified_base 3913: mod_base = OTHER; note = N1-methylpseudouracil
  modified_base 3926: mod_base = OTHER; note = N1-methylpseudouracil
  modified_base 3928: mod_base = OTHER; note = N1-methylpseudouracil
  modified_base 3935: mod_base = OTHER; note = N1-methylpseudouracil
  modified_base 3947: mod_base = OTHER; note = N1-methylpseudouracil
  modified_base 3953: mod_base = OTHER; note = N1-methylpseudouracil
  modified_base 3958: mod_base = OTHER; note = N1-methylpseudouracil
  modified_base 3962: mod_base = OTHER; note = N1-methylpseudouracil
  modified_base 3965: mod_base = OTHER; note = N1-methylpseudouracil
  modified_base 3973: mod_base = OTHER; note = N1-methylpseudouracil
  modified_base 3974: mod_base = OTHER; note = N1-methylpseudouracil
  modified_base 3986: mod_base = OTHER; note = N1-methylpseudouracil
  modified_base 3991: mod_base = OTHER; note = N1-methylpseudouracil
  modified_base 3992: mod_base = OTHER; note = N1-methylpseudouracil
  modified_base 3995: mod_base = OTHER; note = N1-methylpseudouracil
  modified_base 3998: mod_base = OTHER; note = N1-methylpseudouracil
  modified_base 4001: mod_base = OTHER; note = N1-methylpseudouracil
  modified_base 4012: mod_base = OTHER; note = N1-methylpseudouracil
  modified_base 4016: mod_base = OTHER; note = N1-methylpseudouracil
  modified_base 4019: mod_base = OTHER; note = N1-methylpseudouracil
  modified_base 4040: mod_base = OTHER; note = N1-methylpseudouracil
  modified_base 4043: mod_base = OTHER; note = N1-methylpseudouracil
  modified_base 4045: mod_base = OTHER; note = N1-methylpseudouracil
  modified_base 4049: mod_base = OTHER; note = N1-methylpseudouracil
  modified_base 4061: mod_base = OTHER; note = N1-methylpseudouracil
  modified_base 4064: mod_base = OTHER; note = N1-methylpseudouracil
  modified_base 4079: mod_base = OTHER; note = N1-methylpseudouracil
  modified_base 4082: mod_base = OTHER; note = N1-methylpseudouracil
  modified_base 4085: mod_base = OTHER; note = N1-methylpseudouracil
  modified_base 4088: mod_base = OTHER; note = N1-methylpseudouracil
  modified_base 4099: mod_base = OTHER; note = N1-methylpseudouracil
  modified_base 4109: mod_base = OTHER; note = N1-methylpseudouracil
  modified_base 4113: mod_base = OTHER; note = N1-methylpseudouracil
  modified_base 4118: mod_base = OTHER; note = N1-methylpseudouracil
  modified_base 4123: mod_base = OTHER; note = N1-methylpseudouracil
  modified_base 4130: mod_base = OTHER; note = N1-methylpseudouracil
  modified_base 4133: mod_base = OTHER; note = N1-methylpseudouracil
  modified_base 4145: mod_base = OTHER; note = N1-methylpseudouracil
  modified_base 4156: mod_base = OTHER; note = N1-methylpseudouracil
  modified_base 4157: mod_base = OTHER; note = N1-methylpseudouracil
  modified_base 4165: mod_base = OTHER; note = N1-methylpseudouracil
  modified_base 4172: mod_base = OTHER; note = N1-methylpseudouracil
  modified_base 4175: mod_base = OTHER; note = N1-methylpseudouracil
  modified_base 4178: mod_base = OTHER; note = N1-methylpseudouracil
  modified_base 4180: mod_base = OTHER; note = N1-methylpseudouracil
  modified_base 4193: mod_base = OTHER; note = N1-methylpseudouracil
  modified_base 4200: mod_base = OTHER; note = N1-methylpseudouracil
  modified_base 4202: mod_base = OTHER; note = N1-methylpseudouracil
  modified_base 4205: mod_base = OTHER; note = N1-methylpseudouracil
  modified_base 4210: mod_base = OTHER; note = N1-methylpseudouracil
  modified_base 4219: mod_base = OTHER; note = N1-methylpseudouracil
  modified_base 4220: mod_base = OTHER; note = N1-methylpseudouracil
  modified_base 4223: mod_base = OTHER; note = N1-methylpseudouracil
  modified_base 4226: mod_base = OTHER; note = N1-methylpseudouracil
  modified_base 4229: mod_base = OTHER; note = N1-methylpseudouracil
  modified_base 4244: mod_base = OTHER; note = N1-methylpseudouracil
  modified_base 4252: mod_base = OTHER; note = N1-methylpseudouracil
  modified_base 4258: mod_base = OTHER; note = N1-methylpseudouracil
  modified_base 4262: mod_base = OTHER; note = N1-methylpseudouracil
  modified_base 4271: mod_base = OTHER; note = N1-methylpseudouracil
  modified_base 4274: mod_base = OTHER; note = N1-methylpseudouracil
  modified_base 4289: mod_base = OTHER; note = N1-methylpseudouracil
  modified_base 4291: mod_base = OTHER; note = N1-methylpseudouracil
  modified_base 4292: mod_base = OTHER; note = N1-methylpseudouracil
  modified_base 4302: mod_base = OTHER; note = N1-methylpseudouracil
  modified_base 4304: mod_base = OTHER; note = N1-methylpseudouracil
  modified_base 4306: mod_base = OTHER; note = N1-methylpseudouracil
  modified_base 4308: mod_base = OTHER; note = N1-methylpseudouracil
  modified_base 4317: mod_base = OTHER; note = N1-methylpseudouracil
  modified_base 4322: mod_base = OTHER; note = N1-methylpseudouracil
  modified_base 4328: mod_base = OTHER; note = N1-methylpseudouracil
  modified_base 4330: mod_base = OTHER; note = N1-methylpseudouracil
  modified_base 4331: mod_base = OTHER; note = N1-methylpseudouracil
  modified_base 4335: mod_base = OTHER; note = N1-methylpseudouracil
  modified_base 4354: mod_base = OTHER; note = N1-methylpseudouracil
  modified_base 4360: mod_base = OTHER; note = N1-methylpseudouracil
  modified_base 4362: mod_base = OTHER; note = N1-methylpseudouracil
  modified_base 4373: mod_base = OTHER; note = N1-methylpseudouracil
  modified_base 4382: mod_base = OTHER; note = N1-methylpseudouracil
  modified_base 4406: mod_base = OTHER; note = N1-methylpseudouracil
  modified_base 4413: mod_base = OTHER; note = N1-methylpseudouracil
  modified_base 4421: mod_base = OTHER; note = N1-methylpseudouracil
  modified_base 4423: mod_base = OTHER; note = N1-methylpseudouracil
  modified_base 4429: mod_base = OTHER; note = N1-methylpseudouracil
  modified_base 4441: mod_base = OTHER; note = N1-methylpseudouracil
  modified_base 4445: mod_base = OTHER; note = N1-methylpseudouracil
  modified_base 4450: mod_base = OTHER; note = N1-methylpseudouracil
  modified_base 4454: mod_base = OTHER; note = N1-methylpseudouracil
  modified_base 4455: mod_base = OTHER; note = N1-methylpseudouracil
  modified_base 4457: mod_base = OTHER; note = N1-methylpseudouracil
  modified_base 4458: mod_base = OTHER; note = N1-methylpseudouracil
  modified_base 4464: mod_base = OTHER; note = N1-methylpseudouracil
  modified_base 4465: mod_base = OTHER; note = N1-methylpseudouracil
  modified_base 4471: mod_base = OTHER; note = N1-methylpseudouracil
  modified_base 4484: mod_base = OTHER; note = N1-methylpseudouracil
  modified_base 4487: mod_base = OTHER; note = N1-methylpseudouracil
  modified_base 4492: mod_base = OTHER; note = N1-methylpseudouracil
  modified_base 4493: mod_base = OTHER; note = N1-methylpseudouracil
  modified_base 4496: mod_base = OTHER; note = N1-methylpseudouracil
  modified_base 4504: mod_base = OTHER; note = N1-methylpseudouracil
  modified_base 4512: mod_base = OTHER; note = N1-methylpseudouracil
  modified_base 4515: mod_base = OTHER; note = N1-methylpseudouracil
  modified_base 4517: mod_base = OTHER; note = N1-methylpseudouracil
  modified_base 4518: mod_base = OTHER; note = N1-methylpseudouracil
  modified_base 4519: mod_base = OTHER; note = N1-methylpseudouracil
  modified_base 4523: mod_base = OTHER; note = N1-methylpseudouracil
  modified_base 4528: mod_base = OTHER; note = N1-methylpseudouracil
  modified_base 4530: mod_base = OTHER; note = N1-methylpseudouracil
  modified_base 4534: mod_base = OTHER; note = N1-methylpseudouracil
  modified_base 4642: mod_base = OTHER; note = N1-methylpseudouracil
  modified_base 4644: mod_base = OTHER; note = N1-methylpseudouracil
  modified_base 4667: mod_base = OTHER; note = Inverted deoxythymidine
  misc_feature 1..4666: note = RNA
  misc_feature 4667: note = DNA
ggaggaaatcgcaaaatttgctcttcgcgttagatttcttttagttttctcgcaactagcaagctttttgttctcgccatgcagcggagccctctggagaaggccagcgtggtgagcaagctgttcttcagctggaccaggcccatcctgcgaaagggctacagacagaggctggagctgtccgacatctaccagattccatccgtggacagcgccgacaatctgagcgagaagctggagagggagtgggaccgcgagctggccagcaagaagaaccctaagctgatcaacgccctgcgccgctgcttcttctggaggttcatgttctacggcatcttcctgtacctgggcgaggtgaccaaggccgtccagcctctgctgctgggccgcatcatcgccagctacgatcccgacaacaaggaggaacgctccatcgccatctacctgggcatcggcctgtgtctgctgttcatcgtgcggaccctgctgctgcaccccgccatcttcggcctgcatcacatcggcatgcagatgaggatcgccatgttctccctgatctacaagaagaccctgaagctgtccagccgcgtgctggataagatcagcatcgggcagctggtgagcctgctgagcaacaacctgaacaagttcgacgaggggttggcgctggcccacttcgtgtggattgccccgctgcaggtggctctgctgatggggctgatctgggagctgctgcaggcctctgccttctgcgggctggggtttctgatcgtgctggccctgttccaagctggcctgggccgcatgatgatgaagtaccgcgatcagagggccggcaagatcagcgagcgcctggtgatcactagcgagatgatagagaacatccagagcgtgaaggcttactgttgggaggaggccatggagaagatgatcgagaacctgaggcagaccgagctgaagctgactagaaaggcagcctacgtgaggtatttcaactccagcgccttcttcttcagcggcttcttcgtggtgttcctgagcgtgctgccctacgccctgatcaagggcatcatcctgaggaagatcttcaccaccattagcttctgcatcgtgctgcgcatggccgtgaccaggcagttcccttgggccgtgcagacttggtacgacagcctgggagccatcaacaagatccaggactttctgcagaagcaggaatataagaccctggagtacaacctgaccaccaccgaggtggtgatggagaacgtgaccgccttctgggaggagctgggcacccctgtgctgaaggacatcaacttcaagatcgaaagaggccaactgctggccgtggccggatctaccggcgccggcaagaccagcctgctgatgatgatcatgggcgagctggagcccagcgagggcaagatcaagcacagcggccggatctccttctgcccacagttctcctggatcatgcccggcaccatcaaggagaacatcatcttcggcgtgagctacgacgagtacaggtaccggagcgtgatcaaggcctgccagctggaggaggacatctccaaatttcccgagaaggacaacaccgtgctgggcgaaggcgggatcaccctgtccggtggccagcgtgcacgcatctccctggcccgggctgtgtacaaggacgccgacctgtacctgctggacagcccttttggctacctggacgtgctgaccgagaaggagatcttcgagtcctgcgtgtgtaagctgatggccaacaagaccagaatcctggtgaccagcaagatggagcatctgaagaaggccgacaagatcctgatcctgcacgaggggtccagctacttctacggcaccttcagcgagctgcagaacctgcagcccgacttcagctccaagctgatgggctgcgatagcttcgaccagttctccgccgagagaaggaactccattctgaccgagaccctgcaccgattctccctggagggagacgccccagtgagctggaccgagaccaagaagcagagcttcaagcagaccggcgagttcggagagaagcgcaagaactccatcctcaaccccatcaacagcatccggaagttcagcatcgtgcagaagacccctctgcagatgaacgggatcgaggaggacagcgacgagcccctggaacggcgactgtccctcgtgcccgacagcgagcagggcgaggccatcctgccccggatctccgtgatctccactgggcccaccctgcaagcccgacggcggcaaagcgtgctgaacctgatgacccacagcgtgaaccagggccagaatatccaccgcaagactacagccagcacccgcaaggtgagcctggctccccaggccaacctgaccgagctggacatctacagcaggaggctgagccaggagacaggcctggagatcagcgaggagatcaacgaggaggacctgaaggagtgcttcttcgacgacatggagtccatccccgccgtgaccacctggaacacctacctgagatacatcaccgtgcacaagagcctgatcttcgtgctgatctggtgcctggtgatcttcttggccgaggtagccgcctcactggtggtgctgtggctgctgggcaataccccactgcaggacaaggggaactccacccacagccggaacaacagctacgccgtgatcatcacctccaccagcagctactacgtgttctacatctacgtgggcgtggccgacacactgctggccatgggcttcttcagaggcctccctctggtgcacacactgatcaccgtgagcaagatcctgcaccacaagatgctgcacagcgtgctgcaggctcccatgtcaaccctgaacaccctgaaggccggcggcatcctgaacaggttcagcaaggacatcgccattctggacgatctgctgcccctgaccatcttcgacttcatccagctgctgctgatcgtgatcggggccatcgccgtggtggccgtgctgcagccctacatcttcgtggccacagtgcccgtgatcgtggccttcatcatgctgcgcgcctacttcctgcagacctcccagcagctgaagcagctggagagcgaaggccgcagccccatcttcacccacctggtgactagcctgaaggggctgtggaccctgcgcgccttcggcaggcagccctacttcgagaccctgttccacaaggctctgaacctgcacaccgccaactggttcctgtacctcagcaccctgcgctggttccagatgcggatcgagatgatcttcgtgatcttcttcatcgccgtgaccttcatctccatcctgaccaccggggaaggcgagggacgggtgggaatcatcctgaccctggccatgaatatcatgagcaccctgcagtgggccgtgaacagcagcatcgacgtggacagcctgatgcggtccgtgtcccgggtgttcaagttcatcgacatgcccaccgagggcaagcccaccaagagcaccaagccctacaagaacggccagctgagcaaggtgatgattatcgagaacagccacgtgaagaaggacgacatctggccttccggcggccagatgaccgtgaaggacctgaccgccaagtacaccgagggcggcaacgccatcctggagaacatcagcttctccattagccctggacagcgggtgggcctgttgggacggaccggcagtgggaagagcaccctgctgtccgccttcctgcggctgctgaacacggagggcgagatccagatcgacggggtgagctgggacagcatcaccctgcagcagtggcgaaaggccttcggcgtgatcccacagaaggtgtttattttctctggcacctttaggaagaacctggacccctacgagcagtggtccgaccaggagatctggaaggtggccgacgaggtgggcctgcggtcagtgatcgagcagttccccggcaagctggacttcgtgctggtggacggcggctgcgtgctgagccacggccacaagcagctgatgtgcctggcacgcagcgtgctgagcaaggccaagatcctgctgctggacgagccctccgcgcacctggatcccgtgacctaccagatcatcaggcggaccctgaagcaggccttcgccgactgcaccgtgatcctgtgcgagagcagaatcgaggctatgctggagtgccagcagttcctggtgatcgaggagaacaaggtgcggcagtacgactccatccagaagctgctgaacgagcgcagcctgttcagacaggctatctctcccagcgatcgcgtgaagctgttccctcacaggaacagcagcaagtgcaagtctaagccacagatcgccgccctgaaggaggagaccgaggaggaggtgcaggatacccgcctgtaaagctccccgggggcctcggtggcctagcttcttgccccttgggcctccccccagcccctcctccccttcctgcacccgtacccccgtggtctttgaataaagtctgagtgggcggcaaaaaaaaaaaaaaaaaaaaaaaaaaaaaaaaaaaaaaaaaaaaaaaaaaaaaaaaaaaaaaaaaaaaaaaaaaaaaaaaaaaaaaaaaaaaaaaaaaaatctagaaaaaaaaaaaaaaaaaaaat

SEQ ID NO: 25-29 - skipped (5 entries)

SEQ ID NO: 30 - RNA, 4634 nt, synthetic construct
  source 1..4634: mol_type = other RNA
ggaaatcgcaaaatttgctcttcgcgttagatttcttttagttttctcgcaactagcaagctttttgttctcgccatgcagcggagccctctggagaaggccagcgtggtgagcaagctgttcttcagctggaccaggcccatcctgcgaaagggctacagacagaggctggagctgtccgacatctaccagattccatccgtggacagcgccgacaatctgagcgagaagctggagagggagtgggaccgcgagctggccagcaagaagaaccctaagctgatcaacgccctgcgccgctgcttcttctggaggttcatgttctacggcatcttcctgtacctgggcgaggtgaccaaggccgtccagcctctgctgctgggccgcatcatcgccagctacgatcccgacaacaaggaggaacgctccatcgccatctacctgggcatcggcctgtgtctgctgttcatcgtgcggaccctgctgctgcaccccgccatcttcggcctgcatcacatcggcatgcagatgaggatcgccatgttctccctgatctacaagaagaccctgaagctgtccagccgcgtgctggataagatcagcatcgggcagctggtgagcctgctgagcaacaacctgaacaagttcgacgaggggttggcgctggcccacttcgtgtggattgccccgctgcaggtggctctgctgatggggctgatctgggagctgctgcaggcctctgccttctgcgggctggggtttctgatcgtgctggccctgttccaagctggcctgggccgcatgatgatgaagtaccgcgatcagagggccggcaagatcagcgagcgcctggtgatcactagcgagatgatagagaacatccagagcgtgaaggcttactgttgggaggaggccatggagaagatgatcgagaacctgaggcagaccgagctgaagctgactagaaaggcagcctacgtgaggtatttcaactccagcgccttcttcttcagcggcttcttcgtggtgttcctgagcgtgctgccctacgccctgatcaagggcatcatcctgaggaagatcttcaccaccattagcttctgcatcgtgctgcgcatggccgtgaccaggcagttcccttgggccgtgcagacttggtacgacagcctgggagccatcaacaagatccaggactttctgcagaagcaggaatataagaccctggagtacaacctgaccaccaccgaggtggtgatggagaacgtgaccgccttctgggaggagggcttcggcgagctgttcgagaaggccaagcagaacaataacaaccgcaagaccagcaacggcgacgactccctcttcttcagcaactttagcctgctgggcacccctgtgctgaaggacatcaacttcaagatcgaaagaggccaactgctggccgtggccggatctaccggcgccggcaagaccagcctgctgatgatgatcatgggcgagctggagcccagcgagggcaagatcaagcacagcggccggatctccttctgctcccagttctcctggatcatgcccggcaccatcaaggagaacatcatcttcggcgtgagctacgacgagtacaggtaccggagcgtgatcaaggcctgccagctggaggaggacatctccaaatttgccgagaaggacaacattgtgctgggcgaaggcgggatcaccctgtccggtggccagcgtgcacgcatctccctggcccgggctgtgtacaaggacgccgacctgtacctgctggacagcccttttggctacctggacgtgctgaccgagaaggagatcttcgagtcctgcgtgtgtaagctgatggccaacaagaccagaatcctggtgaccagcaagatggagcatctgaagaaggccgacaagatcctgatcctgcacgaggggtccagctacttctacggcaccttcagcgagctgcagaacctgcagcccgacttcagctccaagctgatgggctgcgatagcttcgaccagttctccgccgagagaaggaactccattctgaccgagaccctgcaccgattctccctggagggagacgccccagtgagctggaccgagaccaagaagcagagcttcaagcagaccggcgagttcggagagaagcgcaagaactccatcctcaaccccatcaacagcatccggaagttcagcatcgtgcagaagacccctctgcagatgaacgggatcgaggaggacagcgacgagcccctggaacggcgactgtccctcgtgcccgacagcgagcagggcgaggccatcctgccccggatctccgtgatctccactgggcccaccctgcaagcccgacggcggcaaagcgtgctgaacctgatgacccacagcgtgaaccagggccagaatatccaccgcaagactacagccagcacccgcaaggtgagcctggctccccaggccaacctgaccgagctggacatctacagcaggaggctgagccaggagacaggcctggagatcagcgaggagatcaacgaggaggacctgaaggagtgcttcttcgacgacatggagtccatccccgccgtgaccacctggaacacctacctgagatacatcaccgtgcacaagagcctgatcttcgtgctgatctggtgcctggtgatcttcttggccgaggtagccgcctcactggtggtgctgtggctgctgggcaataccccactgcaggacaaggggaactccacccacagccggaacaacagctacgccgtgatcatcacctccaccagcagctactacgtgttctacatctacgtgggcgtggccgacacactgctggccatgggcttcttcagaggcctccctctggtgcacacactgatcaccgtgagcaagatcctgcaccacaagatgctgcacagcgtgctgcaggctcccatgtcaaccctgaacaccctgaaggccggcggcatcctgaacaggttcagcaaggacatcgccattctggacgatctgctgcccctgaccatcttcgacttcatccagctgctgctgatcgtgatcggggccatcgccgtggtggccgtgctgcagccctacatcttcgtggccacagtgcccgtgatcgtggccttcatcatgctgcgcgcctacttcctgcagacctcccagcagctgaagcagctggagagcgaaggccgcagccccatcttcacccacctggtgactagcctgaaggggctgtggaccctgcgcgccttcggcaggcagccctacttcgagaccctgttccacaaggctctgaacctgcacaccgccaactggttcctgtacctcagcaccctgcgctggttccagatgcggatcgagatgatcttcgtgatcttcttcatcgccgtgaccttcatctccatcctgaccaccggggaaggcgagggacgggtgggaatcatcctgaccctggccatgaatatcatgagcaccctgcagtgggccgtgaacagcagcatcgacgtggacagcctgatgcggtccgtgtcccgggtgttcaagttcatcgacatgcccaccgagggcaagcccaccaagagcaccaagccctacaagaacggccagctgagcaaggtgatgattatcgagaacagccacgtgaagaaggacgacatctggccttccggcggccagatgaccgtgaaggacctgaccgccaagtacaccgagggcggcaacgccatcctggagaacatcagcttctccattagccctggacagcgggtgggcctgttgggacggaccggcagtgggaagagcaccctgctgtccgccttcctgcggctgctgaacacggagggcgagatccagatcgacggggtgagctgggacagcatcaccctgcagcagtggcgaaaggccttcggcgtgatcccacagaaggtgtttattttctctggcacctttaggaagaacctggacccctacgagcagtggtccgaccaggagatctggaaggtggccgacgaggtgggcctgcggtcagtgatcgagcagttccccggcaagctggacttcgtgctggtggacggcggctgcgtgctgagccacggccacaagcagctgatgtgcctggcacgcagcgtgctgagcaaggccaagatcctgctgctggacgagccctccgcgcacctggatcccgtgacctaccagatcatcaggcggaccctgaagcaggccttcgccgactgcaccgtgatcctgtgcgagcacagaatcgaggctatgctggagtgccagcagttcctggtgatcgaggagaacaaggtgcggcagtacgactccatccagaagctgctgaacgagcgcagcctgttcagacaggctatctctcccagcgatcgcgtgaagctgttccctcacaggaacagcagcaagtgcaagtctaagccacagatcgccgccctgaaggaggagaccgaggaggaggtgcaggatacccgcctgtaagtctaagctggagcctcctgagagacctgtgtgaactattgagaagatcggaacagctccttactctgaggaagttggtacccccgtggtctttgaataaagtctgagtgggcggc

SEQ ID NO: 31 - RNA, 4634 nt, synthetic construct
  source 1..4634: mol_type = other RNA
ggaaatcgcaaaatttgctcttcgcgttagatttcttttagttttctcgcaactagcaagctttttgttctcgccatgcagcggagccctctggagaaggccagcgtggtgagcaagctgttcttcagctggaccaggcccatcctgcgaaagggctacagacagaggctggagctgtccgacatctaccagattccatccgtggacagcgccgacaatctgagcgagaagctggagagggagtgggaccgcgagctggccagcaagaagaaccctaagctgatcaacgccctgcgccgctgcttcttctggaggttcatgttctacggcatcttcctgtacctgggcgaggtgaccaaggccgtccagcctctgctgctgggccgcatcatcgccagctacgatcccgacaacaaggaggaacgctccatcgccatctacctgggcatcggcctgtgtctgctgttcatcgtgcggaccctgctgctgcaccccgccatcttcggcctgcatcacatcggcatgcagatgaggatcgccatgttctccctgatctacaagaagaccctgaagctgtccagccgcgtgctggataagatcagcatcgggcagctggtgagcctgctgagcaacaacctgaacaagttcgacgaggggttggcgctggcccacttcgtgtggattgccccgctgcaggtggctctgctgatggggctgatctgggagctgctgcaggcctctgccttctgcgggctggggtttctgatcgtgctggccctgttccaagctggcctgggccgcatgatgatgaagtaccgcgatcagagggccggcaagatcagcgagcgcctggtgatcactagcgagatgatagagaacatccagagcgtgaaggcttactgttgggaggaggccatggagaagatgatcgagaacctgaggcagaccgagctgaagctgactagaaaggcagcctacgtgaggtatttcaactccagcgccttcttcttcagcggcttcttcgtggtgttcctgagcgtgctgccctacgccctgatcaagggcatcatcctgaggaagatcttcaccaccattagcttctgcatcgtgctgcgcatggccgtgaccaggcagttcccttgggccgtgcagacttggtacgacagcctgggagccatcaacaagatccaggactttctgcagaagcaggaatataagaccctggagtacaacctgaccaccaccgaggtggtgatggagaacgtgaccgccttctgggaggagggcttcggcgagctgttcgagaaggccaagcagaacaataacaaccgcaagaccagcaacggcgacgactccctcttcttcagcaactttagcctgctgggcacccctgtgctgaaggacatcaacttcaagatcgaaagaggccaactgctggccgtggccggatctaccggcgccggcaagaccagcctgctgatgatgatcatgggcgagctggagcccagcgagggcaagatcaagcacagcggccggatctccttctgctcccagttctcctggatcatgcccggcaccatcaaggagaacatcatcttcggcgtgagctacgacgagtacaggtaccggagcgtgatcaaggcctgccagctggaggaggacatctccaaatttgccgagaaggacaacattgtgctgggcgaaggcgggatcaccctgtccggtggccagcgtgcacgcatctccctggcccgggctgtgtacaaggacgccgacctgtacctgctggacagcccttttggctacctggacgtgctgaccgagaaggagatcttcgagtcctgcgtgtgtaagctgatggccaacaagaccagaatcctggtgaccagcaagatggagcatctgaagaaggccgacaagatcctgatcctgcacgaggggtccagctacttctacggcaccttcagcgagctgcagaacctgcagcccgacttcagctccaagctgatgggctgcgatagcttcgaccagttctccgccgagagaaggaactccattctgaccgagaccctgcaccgattctccctggagggagacgccccagtgagctggaccgagaccaagaagcagagcttcaagcagaccggcgagttcggagagaagcgcaagaactccatcctcaaccccatcaacagcatccggaagttcagcatcgtgcagaagacccctctgcagatgaacgggatcgaggaggacagcgacgagcccctggaacggcgactgtccctcgtgcccgacagcgagcagggcgaggccatcctgccccggatctccgtgatctccactgggcccaccctgcaagcccgacggcggcaaagcgtgctgaacctgatgacccacagcgtgaaccagggccagaatatccaccgcaagactacagccagcacccgcaaggtgagcctggctccccaggccaacctgaccgagctggacatctacagcaggaggctgagccaggagacaggcctggagatcagcgaggagatcaacgaggaggacctgaaggagtgcttcttcgacgacatggagtccatccccgccgtgaccacctggaacacctacctgagatacatcaccgtgcacaagagcctgatcttcgtgctgatctggtgcctggtgatcttcttggccgaggtagccgcctcactggtggtgctgtggctgctgggcaataccccactgcaggacaaggggaactccacccacagccggaacaacagctacgccgtgatcatcacctccaccagcagctactacgtgttctacatctacgtgggcgtggccgacacactgctggccatgggcttcttcagaggcctccctctggtgcacacactgatcaccgtgagcaagatcctgcaccacaagatgctgcacagcgtgctgcaggctcccatgtcaaccctgaacaccctgaaggccggcggcatcctgaacaggttcagcaaggacatcgccattctggacgatctgctgcccctgaccatcttcgacttcatccagctgctgctgatcgtgatcggggccatcgccgtggtggccgtgctgcagccctacatcttcgtggccacagtgcccgtgatcgtggccttcatcatgctgcgcgcctacttcctgcagacctcccagcagctgaagcagctggagagcgaaggccgcagccccatcttcacccacctggtgactagcctgaaggggctgtggaccctgcgcgccttcggcaggcagccctacttcgagaccctgttccacaaggctctgaacctgcacaccgccaactggttcctgtacctcagcaccctgcgctggttccagatgcggatcgagatgatcttcgtgatcttcttcatcgccgtgaccttcatctccatcctgaccaccggggaaggcgagggacgggtgggaatcatcctgaccctggccatgaatatcatgagcaccctgcagtgggccgtgaacagcagcatcgacgtggacagcctgatgcggtccgtgtcccgggtgttcaagttcatcgacatgcccaccgagggcaagcccaccaagagcaccaagccctacaagaacggccagctgagcaaggtgatgattatcgagaacagccacgtgaagaaggacgacatctggccttccggcggccagatgaccgtgaaggacctgaccgccaagtacaccgagggcggcaacgccatcctggagaacatcagcttctccattagccctggacagcgggtgggcctgttgggacggaccggcagtgggaagagcaccctgctgtccgccttcctgcggctgctgaacacggagggcgagatccagatcgacggggtgagctgggacagcatcaccctgcagcagtggcgaaaggccttcggcgtgatcccacagaaggtgtttattttctctggcacctttaggaagaacctggacccctacgagcagtggtccgaccaggagatctggaaggtggccgacgaggtgggcctgcggtcagtgatcgagcagttccccggcaagctggacttcgtgctggtggacggcggctgcgtgctgagccacggccacaagcagctgatgtgcctggcacgcagcgtgctgagcaaggccaagatcctgctgctggacgagccctccgcgcacctggatcccgtgacctaccagatcatcaggcggaccctgaagcaggccttcgccgactgcaccgtgatcctgtgcgagcacagaatcgaggctatgctggagtgccagcagttcctggtgatcgaggagaacaaggtgcggcagtacgactccatccagaagctgctgaacgagcgcagcctgttcagacaggctatctctcccagcgatcgcgtgaagctgttccctcacaggaacagcagcaagtgcaagtctaagccacagatcgccgccctgaaggaggagaccgaggaggaggtgcaggatacccgcctgtaaagctccccgggggcctcggtggcctagcttcttgccccttgggcctccccccagcccctcctccccttcctgcacccgtacccccgtggtctttgaataaagtctgagtgggcggc

SEQ ID NO: 32 - RNA, 4624 nt, synthetic construct
  source 1..4624: mol_type = other RNA
ggaaatcgcaaaatttgctcttcgcgttagatttcttttagttttctcgcaactagcaagctttttgttctcgccatgcagcggagccctctggagaaggccagcgtggtgagcaagctgttcttcagctggaccaggcccatcctgcgaaagggctacagacagaggctggagctgtccgacatctaccagattccatccgtggacagcgccgacaatctgagcgagaagctggagagggagtgggaccgcgagctggccagcaagaagaaccctaagctgatcaacgccctgcgccgctgcttcttctggaggttcatgttctacggcatcttcctgtacctgggcgaggtgaccaaggccgtccagcctctgctgctgggccgcatcatcgccagctacgatcccgacaacaaggaggaacgctccatcgccatctacctgggcatcggcctgtgtctgctgttcatcgtgcggaccctgctgctgcaccccgccatcttcggcctgcatcacatcggcatgcagatgaggatcgccatgttctccctgatctacaagaagaccctgaagctgtccagccgcgtgctggataagatcagcatcgggcagctggtgagcctgctgagcaacaacctgaacaagttcgacgaggggttggcgctggcccacttcgtgtggattgccccgctgcaggtggctctgctgatggggctgatctgggagctgctgcaggcctctgccttctgcgggctggggtttctgatcgtgctggccctgttccaagctggcctgggccgcatgatgatgaagtaccgcgatcagagggccggcaagatcagcgagcgcctggtgatcactagcgagatgatagagaacatccagagcgtgaaggcttactgttgggaggaggccatggagaagatgatcgagaacctgaggcagaccgagctgaagctgactagaaaggcagcctacgtgaggtatttcaactccagcgccttcttcttcagcggcttcttcgtggtgttcctgagcgtgctgccctacgccctgatcaagggcatcatcctgaggaagatcttcaccaccattagcttctgcatcgtgctgcgcatggccgtgaccaggcagttcccttgggccgtgcagacttggtacgacagcctgggagccatcaacaagatccaggactttctgcagaagcaggaatataagaccctggagtacaacctgaccaccaccgaggtggtgatggagaacgtgaccgccttctgggaggagggcttcggcgagctgttcgagaaggccaagcagaacaataacaaccgcaagaccagcaacggcgacgactccctcttcttcagcaactttagcctgctgggcacccctgtgctgaaggacatcaacttcaagatcgaaagaggccaactgctggccgtggccggatctaccggcgccggcaagaccagcctgctgatgatgatcatgggcgagctggagcccagcgagggcaagatcaagcacagcggccggatctccttctgctcccagttctcctggatcatgcccggcaccatcaaggagaacatcatcttcggcgtgagctacgacgagtacaggtaccggagcgtgatcaaggcctgccagctggaggaggacatctccaaatttgccgagaaggacaacattgtgctgggcgaaggcgggatcaccctgtccggtggccagcgtgcacgcatctccctggcccgggctgtgtacaaggacgccgacctgtacctgctggacagcccttttggctacctggacgtgctgaccgagaaggagatcttcgagtcctgcgtgtgtaagctgatggccaacaagaccagaatcctggtgaccagcaagatggagcatctgaagaaggccgacaagatcctgatcctgcacgaggggtccagctacttctacggcaccttcagcgagctgcagaacctgcagcccgacttcagctccaagctgatgggctgcgatagcttcgaccagttctccgccgagagaaggaactccattctgaccgagaccctgcaccgattctccctggagggagacgccccagtgagctggaccgagaccaagaagcagagcttcaagcagaccggcgagttcggagagaagcgcaagaactccatcctcaaccccatcaacagcatccggaagttcagcatcgtgcagaagacccctctgcagatgaacgggatcgaggaggacagcgacgagcccctggaacggcgactgtccctcgtgcccgacagcgagcagggcgaggccatcctgccccggatctccgtgatctccactgggcccaccctgcaagcccgacggcggcaaagcgtgctgaacctgatgacccacagcgtgaaccagggccagaatatccaccgcaagactacagccagcacccgcaaggtgagcctggctccccaggccaacctgaccgagctggacatctacagcaggaggctgagccaggagacaggcctggagatcagcgaggagatcaacgaggaggacctgaaggagtgcttcttcgacgacatggagtccatccccgccgtgaccacctggaacacctacctgagatacatcaccgtgcacaagagcctgatcttcgtgctgatctggtgcctggtgatcttcttggccgaggtagccgcctcactggtggtgctgtggctgctgggcaataccccactgcaggacaaggggaactccacccacagccggaacaacagctacgccgtgatcatcacctccaccagcagctactacgtgttctacatctacgtgggcgtggccgacacactgctggccatgggcttcttcagaggcctccctctggtgcacacactgatcaccgtgagcaagatcctgcaccacaagatgctgcacagcgtgctgcaggctcccatgtcaaccctgaacaccctgaaggccggcggcatcctgaacaggttcagcaaggacatcgccattctggacgatctgctgcccctgaccatcttcgacttcatccagctgctgctgatcgtgatcggggccatcgccgtggtggccgtgctgcagccctacatcttcgtggccacagtgcccgtgatcgtggccttcatcatgctgcgcgcctacttcctgcagacctcccagcagctgaagcagctggagagcgaaggccgcagccccatcttcacccacctggtgactagcctgaaggggctgtggaccctgcgcgccttcggcaggcagccctacttcgagaccctgttccacaaggctctgaacctgcacaccgccaactggttcctgtacctcagcaccctgcgctggttccagatgcggatcgagatgatcttcgtgatcttcttcatcgccgtgaccttcatctccatcctgaccaccggggaaggcgagggacgggtgggaatcatcctgaccctggccatgaatatcatgagcaccctgcagtgggccgtgaacagcagcatcgacgtggacagcctgatgcggtccgtgtcccgggtgttcaagttcatcgacatgcccaccgagggcaagcccaccaagagcaccaagccctacaagaacggccagctgagcaaggtgatgattatcgagaacagccacgtgaagaaggacgacatctggccttccggcggccagatgaccgtgaaggacctgaccgccaagtacaccgagggcggcaacgccatcctggagaacatcagcttctccattagccctggacagcgggtgggcctgttgggacggaccggcagtgggaagagcaccctgctgtccgccttcctgcggctgctgaacacggagggcgagatccagatcgacggggtgagctgggacagcatcaccctgcagcagtggcgaaaggccttcggcgtgatcccacagaaggtgtttattttctctggcacctttaggaagaacctggacccctacgagcagtggtccgaccaggagatctggaaggtggccgacgaggtgggcctgcggtcagtgatcgagcagttccccggcaagctggacttcgtgctggtggacggcggctgcgtgctgagccacggccacaagcagctgatgtgcctggcacgcagcgtgctgagcaaggccaagatcctgctgctggacgagccctccgcgcacctggatcccgtgacctaccagatcatcaggcggaccctgaagcaggccttcgccgactgcaccgtgatcctgtgcgagcacagaatcgaggctatgctggagtgccagcagttcctggtgatcgaggagaacaaggtgcggcagtacgactccatccagaagctgctgaacgagcgcagcctgttcagacaggctatctctcccagcgatcgcgtgaagctgttccctcacaggaacagcagcaagtgcaagtctaagccacagatcgccgccctgaaggaggagaccgaggaggaggtgcaggatacccgcctgtaaagctccccgggggcctccaccgcgttatccgttcctcgtaggctggtcctggggaacgggtcggcgggtacccccgtggtctttgaataaagtctgagtgggcggc

SEQ ID NO: 33 - RNA, 4653 nt, synthetic construct
  source 1..4653: mol_type = other RNA
ggaaatttttttttgatattataagagtttttttttgatattaagaaaatttttttttgatattagaagagtaagaagaaatataagaccccggcgccgccaccatgcagcggagccctctggagaaggccagcgtggtgagcaagctgttcttcagctggaccaggcccatcctgcgaaagggctacagacagaggctggagctgtccgacatctaccagattccatccgtggacagcgccgacaatctgagcgagaagctggagagggagtgggaccgcgagctggccagcaagaagaaccctaagctgatcaacgccctgcgccgctgcttcttctggaggttcatgttctacggcatcttcctgtacctgggcgaggtgaccaaggccgtccagcctctgctgctgggccgcatcatcgccagctacgatcccgacaacaaggaggaacgctccatcgccatctacctgggcatcggcctgtgtctgctgttcatcgtgcggaccctgctgctgcaccccgccatcttcggcctgcatcacatcggcatgcagatgaggatcgccatgttctccctgatctacaagaagaccctgaagctgtccagccgcgtgctggataagatcagcatcgggcagctggtgagcctgctgagcaacaacctgaacaagttcgacgaggggttggcgctggcccacttcgtgtggattgccccgctgcaggtggctctgctgatggggctgatctgggagctgctgcaggcctctgccttctgcgggctggggtttctgatcgtgctggccctgttccaagctggcctgggccgcatgatgatgaagtaccgcgatcagagggccggcaagatcagcgagcgcctggtgatcactagcgagatgatagagaacatccagagcgtgaaggcttactgttgggaggaggccatggagaagatgatcgagaacctgaggcagaccgagctgaagctgactagaaaggcagcctacgtgaggtatttcaactccagcgccttcttcttcagcggcttcttcgtggtgttcctgagcgtgctgccctacgccctgatcaagggcatcatcctgaggaagatcttcaccaccattagcttctgcatcgtgctgcgcatggccgtgaccaggcagttcccttgggccgtgcagacttggtacgacagcctgggagccatcaacaagatccaggactttctgcagaagcaggaatataagaccctggagtacaacctgaccaccaccgaggtggtgatggagaacgtgaccgccttctgggaggagggcttcggcgagctgttcgagaaggccaagcagaacaataacaaccgcaagaccagcaacggcgacgactccctcttcttcagcaactttagcctgctgggcacccctgtgctgaaggacatcaacttcaagatcgaaagaggccaactgctggccgtggccggatctaccggcgccggcaagaccagcctgctgatgatgatcatgggcgagctggagcccagcgagggcaagatcaagcacagcggccggatctccttctgctcccagttctcctggatcatgcccggcaccatcaaggagaacatcatcttcggcgtgagctacgacgagtacaggtaccggagcgtgatcaaggcctgccagctggaggaggacatctccaaatttgccgagaaggacaacattgtgctgggcgaaggcgggatcaccctgtccggtggccagcgtgcacgcatctccctggcccgggctgtgtacaaggacgccgacctgtacctgctggacagcccttttggctacctggacgtgctgaccgagaaggagatcttcgagtcctgcgtgtgtaagctgatggccaacaagaccagaatcctggtgaccagcaagatggagcatctgaagaaggccgacaagatcctgatcctgcacgaggggtccagctacttctacggcaccttcagcgagctgcagaacctgcagcccgacttcagctccaagctgatgggctgcgatagcttcgaccagttctccgccgagagaaggaactccattctgaccgagaccctgcaccgattctccctggagggagacgccccagtgagctggaccgagaccaagaagcagagcttcaagcagaccggcgagttcggagagaagcgcaagaactccatcctcaaccccatcaacagcatccggaagttcagcatcgtgcagaagacccctctgcagatgaacgggatcgaggaggacagcgacgagcccctggaacggcgactgtccctcgtgcccgacagcgagcagggcgaggccatcctgccccggatctccgtgatctccactgggcccaccctgcaagcccgacggcggcaaagcgtgctgaacctgatgacccacagcgtgaaccagggccagaatatccaccgcaagactacagccagcacccgcaaggtgagcctggctccccaggccaacctgaccgagctggacatctacagcaggaggctgagccaggagacaggcctggagatcagcgaggagatcaacgaggaggacctgaaggagtgcttcttcgacgacatggagtccatccccgccgtgaccacctggaacacctacctgagatacatcaccgtgcacaagagcctgatcttcgtgctgatctggtgcctggtgatcttcttggccgaggtagccgcctcactggtggtgctgtggctgctgggcaataccccactgcaggacaaggggaactccacccacagccggaacaacagctacgccgtgatcatcacctccaccagcagctactacgtgttctacatctacgtgggcgtggccgacacactgctggccatgggcttcttcagaggcctccctctggtgcacacactgatcaccgtgagcaagatcctgcaccacaagatgctgcacagcgtgctgcaggctcccatgtcaaccctgaacaccctgaaggccggcggcatcctgaacaggttcagcaaggacatcgccattctggacgatctgctgcccctgaccatcttcgacttcatccagctgctgctgatcgtgatcggggccatcgccgtggtggccgtgctgcagccctacatcttcgtggccacagtgcccgtgatcgtggccttcatcatgctgcgcgcctacttcctgcagacctcccagcagctgaagcagctggagagcgaaggccgcagccccatcttcacccacctggtgactagcctgaaggggctgtggaccctgcgcgccttcggcaggcagccctacttcgagaccctgttccacaaggctctgaacctgcacaccgccaactggttcctgtacctcagcaccctgcgctggttccagatgcggatcgagatgatcttcgtgatcttcttcatcgccgtgaccttcatctccatcctgaccaccggggaaggcgagggacgggtgggaatcatcctgaccctggccatgaatatcatgagcaccctgcagtgggccgtgaacagcagcatcgacgtggacagcctgatgcggtccgtgtcccgggtgttcaagttcatcgacatgcccaccgagggcaagcccaccaagagcaccaagccctacaagaacggccagctgagcaaggtgatgattatcgagaacagccacgtgaagaaggacgacatctggccttccggcggccagatgaccgtgaaggacctgaccgccaagtacaccgagggcggcaacgccatcctggagaacatcagcttctccattagccctggacagcgggtgggcctgttgggacggaccggcagtgggaagagcaccctgctgtccgccttcctgcggctgctgaacacggagggcgagatccagatcgacggggtgagctgggacagcatcaccctgcagcagtggcgaaaggccttcggcgtgatcccacagaaggtgtttattttctctggcacctttaggaagaacctggacccctacgagcagtggtccgaccaggagatctggaaggtggccgacgaggtgggcctgcggtcagtgatcgagcagttccccggcaagctggacttcgtgctggtggacggcggctgcgtgctgagccacggccacaagcagctgatgtgcctggcacgcagcgtgctgagcaaggccaagatcctgctgctggacgagccctccgcgcacctggatcccgtgacctaccagatcatcaggcggaccctgaagcaggccttcgccgactgcaccgtgatcctgtgcgagcacagaatcgaggctatgctggagtgccagcagttcctggtgatcgaggagaacaaggtgcggcagtacgactccatccagaagctgctgaacgagcgcagcctgttcagacaggctatctctcccagcgatcgcgtgaagctgttccctcacaggaacagcagcaagtgcaagtctaagccacagatcgccgccctgaaggaggagaccgaggaggaggtgcaggatacccgcctgtaaagctccccgggggcctccaccgcgttatccgttcctcgtaggctggtcctggggaacgggtcggcgggtacccccgtggtctttgaataaagtctgagtgggcggc

SEQ ID NO: 34 - RNA, 4653 nt, synthetic construct
  source 1..4653: mol_type = other RNA
ggaaatttttttttgatattataagagtttttttttgatattaagaaaatttttttttgatattagaagagtaagaagaaatataagaccccggcgccgccaccatgcaaagaagtccattagagaaagcgtcggttgtgagcaagctgttcttcagctggaccaggcccatcctgcgaaagggctacagacagaggctggagctgtccgacatctaccagattccatccgtggacagcgccgacaatctgagcgagaagctggagagggagtgggaccgcgagctggccagcaagaagaaccctaagctgatcaacgccctgcgccgctgcttcttctggaggttcatgttctacggcatcttcctgtacctgggcgaggtgaccaaggccgtccagcctctgctgctgggccgcatcatcgccagctacgatcccgacaacaaggaggaacgctccatcgccatctacctgggcatcggcctgtgtctgctgttcatcgtgcggaccctgctgctgcaccccgccatcttcggcctgcatcacatcggcatgcagatgaggatcgccatgttctccctgatctacaagaagaccctgaagctgtccagccgcgtgctggataagatcagcatcgggcagctggtgagcctgctgagcaacaacctgaacaagttcgacgaggggttggcgctggcccacttcgtgtggattgccccgctgcaggtggctctgctgatggggctgatctgggagctgctgcaggcctctgccttctgcgggctggggtttctgatcgtgctggccctgttccaagctggcctgggccgcatgatgatgaagtaccgcgatcagagggccggcaagatcagcgagcgcctggtgatcactagcgagatgatagagaacatccagagcgtgaaggcttactgttgggaggaggccatggagaagatgatcgagaacctgaggcagaccgagctgaagctgactagaaaggcagcctacgtgaggtatttcaactccagcgccttcttcttcagcggcttcttcgtggtgttcctgagcgtgctgccctacgccctgatcaagggcatcatcctgaggaagatcttcaccaccattagcttctgcatcgtgctgcgcatggccgtgaccaggcagttcccttgggccgtgcagacttggtacgacagcctgggagccatcaacaagatccaggactttctgcagaagcaggaatataagaccctggagtacaacctgaccaccaccgaggtggtgatggagaacgtgaccgccttctgggaggagggcttcggcgagctgttcgagaaggccaagcagaacaataacaaccgcaagaccagcaacggcgacgactccctcttcttcagcaactttagcctgctgggcacccctgtgctgaaggacatcaacttcaagatcgaaagaggccaactgctggccgtggccggatctaccggcgccggcaagaccagcctgctgatgatgatcatgggcgagctggagcccagcgagggcaagatcaagcacagcggccggatctccttctgctcccagttctcctggatcatgcccggcaccatcaaggagaacatcatcttcggcgtgagctacgacgagtacaggtaccggagcgtgatcaaggcctgccagctggaggaggacatctccaaatttgccgagaaggacaacattgtgctgggcgaaggcgggatcaccctgtccggtggccagcgtgcacgcatctccctggcccgggctgtgtacaaggacgccgacctgtacctgctggacagcccttttggctacctggacgtgctgaccgagaaggagatcttcgagtcctgcgtgtgtaagctgatggccaacaagaccagaatcctggtgaccagcaagatggagcatctgaagaaggccgacaagatcctgatcctgcacgaggggtccagctacttctacggcaccttcagcgagctgcagaacctgcagcccgacttcagctccaagctgatgggctgcgatagcttcgaccagttctccgccgagagaaggaactccattctgaccgagaccctgcaccgattctccctggagggagacgccccagtgagctggaccgagaccaagaagcagagcttcaagcagaccggcgagttcggagagaagcgcaagaactccatcctcaaccccatcaacagcatccggaagttcagcatcgtgcagaagacccctctgcagatgaacgggatcgaggaggacagcgacgagcccctggaacggcgactgtccctcgtgcccgacagcgagcagggcgaggccatcctgccccggatctccgtgatctccactgggcccaccctgcaagcccgacggcggcaaagcgtgctgaacctgatgacccacagcgtgaaccagggccagaatatccaccgcaagactacagccagcacccgcaaggtgagcctggctccccaggccaacctgaccgagctggacatctacagcaggaggctgagccaggagacaggcctggagatcagcgaggagatcaacgaggaggacctgaaggagtgcttcttcgacgacatggagtccatccccgccgtgaccacctggaacacctacctgagatacatcaccgtgcacaagagcctgatcttcgtgctgatctggtgcctggtgatcttcttggccgaggtagccgcctcactggtggtgctgtggctgctgggcaataccccactgcaggacaaggggaactccacccacagccggaacaacagctacgccgtgatcatcacctccaccagcagctactacgtgttctacatctacgtgggcgtggccgacacactgctggccatgggcttcttcagaggcctccctctggtgcacacactgatcaccgtgagcaagatcctgcaccacaagatgctgcacagcgtgctgcaggctcccatgtcaaccctgaacaccctgaaggccggcggcatcctgaacaggttcagcaaggacatcgccattctggacgatctgctgcccctgaccatcttcgacttcatccagctgctgctgatcgtgatcggggccatcgccgtggtggccgtgctgcagccctacatcttcgtggccacagtgcccgtgatcgtggccttcatcatgctgcgcgcctacttcctgcagacctcccagcagctgaagcagctggagagcgaaggccgcagccccatcttcacccacctggtgactagcctgaaggggctgtggaccctgcgcgccttcggcaggcagccctacttcgagaccctgttccacaaggctctgaacctgcacaccgccaactggttcctgtacctcagcaccctgcgctggttccagatgcggatcgagatgatcttcgtgatcttcttcatcgccgtgaccttcatctccatcctgaccaccggggaaggcgagggacgggtgggaatcatcctgaccctggccatgaatatcatgagcaccctgcagtgggccgtgaacagcagcatcgacgtggacagcctgatgcggtccgtgtcccgggtgttcaagttcatcgacatgcccaccgagggcaagcccaccaagagcaccaagccctacaagaacggccagctgagcaaggtgatgattatcgagaacagccacgtgaagaaggacgacatctggccttccggcggccagatgaccgtgaaggacctgaccgccaagtacaccgagggcggcaacgccatcctggagaacatcagcttctccattagccctggacagcgggtgggcctgttgggacggaccggcagtgggaagagcaccctgctgtccgccttcctgcggctgctgaacacggagggcgagatccagatcgacggggtgagctgggacagcatcaccctgcagcagtggcgaaaggccttcggcgtgatcccacagaaggtgtttattttctctggcacctttaggaagaacctggacccctacgagcagtggtccgaccaggagatctggaaggtggccgacgaggtgggcctgcggtcagtgatcgagcagttccccggcaagctggacttcgtgctggtggacggcggctgcgtgctgagccacggccacaagcagctgatgtgcctggcacgcagcgtgctgagcaaggccaagatcctgctgctggacgagccctccgcgcacctggatcccgtgacctaccagatcatcaggcggaccctgaagcaggccttcgccgactgcaccgtgatcctgtgcgagcacagaatcgaggctatgctggagtgccagcagttcctggtgatcgaggagaacaaggtgcggcagtacgactccatccagaagctgctgaacgagcgcagcctgttcagacaggctatctctcccagcgatcgcgtgaagctgttccctcacaggaacagcagcaagtgcaagtctaagccacagatcgccgccctgaaggaggagaccgaggaggaggtgcaggatacccgcctgtaaagctccccgggggcctccaccgcgttatccgttcctcgtaggctggtcctggggaacgggtcggcgggtacccccgtggtctttgaataaagtctgagtgggcggc

SEQ ID NO: 35 - RNA, 4653 nt, synthetic construct
  source 1..4653: mol_type = other RNA
ggaaatttttttttgatattataagagtttttttttgatattaagaaaatttttttttgatattagaagagtaagaagaaatataagaccccggcgccgccaccatgcagaggagcccgctggagaaggccagcgtggtgtccaagctgttcttctcctggacccggcccatcctgcggaagggataccggcagcggctggagctgagcgacatctaccagatccccagcgtggactccgccgacaacctgagcgagaagctggagcgggagtgggaccgggagctggcctccaagaagaaccccaagctgatcaacgccctgcgccggtgcttcttctggcggttcatgttctacggcatcttcctgtacctgggcgaggtgaccaaggccgtgcagcccctgctgttgggccgcatcatcgccagctacgaccccgacaacaaggaggagcgcagcatcgccatctacctgggcatcggcctgtgcctgctcttcatcgtgcgcaccctgctgctgcaccccgccatcttcggcctgcaccacatcgggatgcagatgcggatcgccatgttcagcctcatctacaagaagaccctgaagctgtccagcagggtgctggacaagatcagcatcgggcagctggtgagcctgctgtccaacaacctgaacaagttcgacgagggcctggccctagcccacttcgtgtggatcgcccctctgcaggtggccctgctgatgggcctgatctgggagctgctgcaggcctccgccttctgcgggctgggcttcctgatcgtgctggccctgtttcaggcagggctgggacggatgatgatgaagtatcgggaccagcgggctggaaagatctccgagcgactggtaatcaccagcgaaatgatcgagaacatccagtccgtgaaggcctactgctgggaggaggccatggagaagatgatcgagaatctgcggcagaccgagctgaagctgaccagaaaggccgcctacgtgaggtacttcaacagctccgccttcttcttcagcggcttcttcgtggtgttcctgtccgtgctgccttacgccctgatcaagggcatcatcctgaggaagatcttcaccaccatcagcttctgcatcgtgctgcggatggccgtgacccgccagttcccctgggccgtgcagacctggtacgacagcctgggcgccatcaacaagatccaggacttcctgcagaagcaggagtacaagaccctggagtacaacctgaccaccaccgaggtggtgatggagaacgtgaccgccttctgggaggagggcttcggcgagctgttcgagaaggccaagcagaacaacaacaaccggaagaccagcaacggcgacgacagcctgttcttctccaacttcagcctgctgggcaccccagtgctgaaggacatcaacttcaagatcgagcggggacagttgctggctgtggccggctccaccggcgccggaaagactagcctgctgatgatgatcatgggcgagctggagccctccgaggggaagatcaagcactcaggccggatcagcttctgcagccagttctcttggatcatgcccggcaccatcaaggagaacatcatcttcggcgtgtcctacgacgagtaccggtaccggagcgtgatcaaggcctgccagctggaggaggacatcagcaagttcgccgagaaggacaacatcgtgctgggcgagggaggcatcaccctgagcggaggccaacgggcaaggatcagcctggccagggccgtgtacaaggacgctgacctgtacctgctggacagccccttcggctacctggacgtgctgaccgagaaggagatcttcgagtcctgcgtgtgcaagctgatggccaacaagacccgcatcctggtgaccagcaagatggagcacctgaagaaggccgacaagatcctgatcctgcacgagggatccagctacttctacggcaccttcagcgagctgcagaacctgcagcccgacttcagcagcaagcttatggggtgcgacagcttcgaccagttctccgctgagcgccggaattccatcctgaccgagaccctgcaccgcttctccctggagggcgacgctcccgtgagctggaccgagaccaagaagcagtccttcaagcagaccggggagttcggcgagaagcggaagaacagcatcctgaaccccatcaacagcatccggaagttctccatcgtccagaagacacccctgcagatgaacgggatcgaggaggacagcgacgagcccttggagcggcgcctgagcctggtgcccgacagcgagcagggcgaggccatcctgccccgcatctccgtgatcagcaccggccccacactgcaggcccggagacgccagtccgtgctgaacctgatgacccactccgtgaaccaggggcagaacatccatcggaagaccaccgcctccacccggaaggtgagcctggccccacaggccaacctgaccgagctggatatctactcccggaggctgagccaggagaccggcctggagatcagcgaggagatcaacgaggaggacctgaaggagtgcttcttcgacgacatggagtccatccccgccgtgaccacctggaacacctacctgcgctacatcaccgtgcacaagtccctgatcttcgtgctcatctggtgcctggtgatcttccttgccgaagtcgccgccagcctggtggtgctgtggctgctgggcaacacccctctgcaggataagggcaacagcacccacagccggaacaacagctacgccgtgatcatcaccagcaccagctcctactacgtgttctacatctacgtgggagtggccgacaccctgctggccatgggcttcttccggggcctgcctctggtgcacaccctgatcaccgtgagcaagatcctgcaccacaagatgctgcacagcgtgctgcaggcccctatgagcaccctgaacaccctgaaggccggcgggatcctgaacaggttcagcaaggacatcgccatcctggacgacctgctgcccctgaccatcttcgacttcatccagctgctgctgatcgtgatcggcgccatcgccgtggtggccgtgctgcagccctacatcttcgtggccacagtgcccgtgatcgtggccttcatcatgctgagggcatacttcctgcagaccagccagcagctgaagcagctggagagcgaggggagatcccctatcttcacccacctggtgaccagcctgaagggactgtggaccctgcgcgctttcggccgccagccctacttcgagaccctgttccacaaggccctgaacctccacaccgccaactggttcctgtacctgtccaccctgaggtggttccagatgcggatcgagatgatcttcgtgatcttcttcatcgccgtgaccttcatctccatcctgaccactggcgaaggggagggtagggtgggcatcatcctcaccctggccatgaacatcatgtcaaccctgcagtgggccgtgaacagctccatcgacgtggacagcctgatgaggtccgtgtcccgggtgttcaagttcatcgacatgcccaccgagggcaagcccaccaagagcaccaagccatacaagaacggccagctgtccaaggtgatgatcatcgagaacagccacgtgaagaaggacgacatttggccctccggcgggcaaatgaccgtgaaggacctgaccgccaagtacaccgagggcggcaacgccatcctggagaacatcagcttctccatcagccccggtcagagggtcggactgctgggcaggactggcagcgggaagagcacactgctgtccgccttcctgcgcctgctgaacaccgaaggggagatccagatcgacggcgtgtcctgggacagcatcaccctgcagcagtggcgcaaggccttcggggtgatcccacagaaggtgttcatcttcagcggcaccttccggaagaacctggacccctacgagcagtggagcgaccaggagatctggaaggtggccgacgaggtgggcctgcgcagcgtgatcgagcagttccccggcaagctggacttcgtgctggtggacggcggctgcgtgctgagccacggccacaagcagctgatgtgcttggcccggagcgtgctgtccaaggccaagatcctcctgctggacgagccctcagcccacctcgaccccgtgacctaccagatcatccggcggaccctgaagcaggccttcgccgactgcaccgtgatcctgtgcgagcaccggatcgaggccatgctggagtgccagcagttcctggtgatcgaggagaacaaggtgcggcagtacgacagcatccagaagctgctgaacgagcggagcctgttccggcaggccatcagccccagcgaccgggtgaagctgttcccacaccgcaacagcagcaagtgcaagtccaagccccagatcgccgccctgaaggaggagaccgaggaggaggtgcaggacaccaggctgtaaagctccccgggggcctccaccgcgttatccgttcctcgtaggctggtcctggggaacgggtcggcgggtacccccgtggtctttgaataaagtctgagtgggcggc

SEQ ID NO: 36 - RNA, 4634 nt, synthetic construct
  source 1..4634: mol_type = other RNA
ggaaatcgcaaaatttgctcttcgcgttagatttcttttagttttctcgcaactagcaagctttttgttctcgccatgcagcggagccctctggagaaggccagcgtggtgagcaagctgttcttcagctggaccaggcccatcctgcgaaagggctacagacagaggctggagctgtccgacatctaccagattccatccgtggacagcgccgacaatctgagcgagaagctggagagggagtgggaccgcgagctggccagcaagaagaaccctaagctgatcaacgccctgcgccgctgcttcttctggaggttcatgttctacggcatcttcctgtacctgggcgaggtgaccaaggccgtccagcctctgctgctgggccgcatcatcgccagctacgatcccgacaacaaggaggaacgctccatcgccatctacctgggcatcggcctgtgtctgctgttcatcgtgcggaccctgctgctgcaccccgccatcttcggcctgcatcacatcggcatgcagatgaggatcgccatgttctccctgatctacaagaagaccctgaagctgtccagccgcgtgctggataagatcagcatcgggcagctggtgagcctgctgagcaacaacctgaacaagttcgacgaggggttggcgctggcccacttcgtgtggattgccccgctgcaggtggctctgctgatggggctgatctgggagctgctgcaggcctctgccttctgcgggctggggtttctgatcgtgctggccctgttccaagctggcctgggccgcatgatgatgaagtaccgcgatcagagggccggcaagatcagcgagcgcctggtgatcactagcgagatgatagagaacatccagagcgtgaaggcttactgttgggaggaggccatggagaagatgatcgagaacctgaggcagaccgagctgaagctgactagaaaggcagcctacgtgaggtatttcaactccagcgccttcttcttcagcggcttcttcgtggtgttcctgagcgtgctgccctacgccctgatcaagggcatcatcctgaggaagatcttcaccaccattagcttctgcatcgtgctgcgcatggccgtgaccaggcagttcccttgggccgtgcagacttggtacgacagcctgggagccatcaacaagatccaggactttctgcagaagcaggaatataagaccctggagtacaacctgaccaccaccgaggtggtgatggagaacgtgaccgccttctgggaggagggcttcggcgagctgttcgagaaggccaagcagaacaataacaaccgcaagaccagcaacggcgacgactccctcttcttcagcaactttagcctgctgggcacccctgtgctgaaggacatcaacttcaagatcgaaagaggccaactgctggccgtggccggatctaccggcgccggcaagaccagcctgctgatgatgatcatgggcgagctggagcccagcgagggcaagatcaagcacagcggccggatctccttctgctcccagttctcctggatcatgcccggcaccatcaaggagaacatcatcttcggcgtgagctacgacgagtacaggtaccggagcgtgatcaaggcctgccagctggaggaggacatctccaaatttgccgagaaggacaacattgtgctgggcgaaggcgggatcaccctgtccggtggccagcgtgcacgcatctccctggcccgggctgtgtacaaggacgccgacctgtacctgctggacagcccttttggctacctggacgtgctgaccgagaaggagatcttcgagtcctgcgtgtgtaagctgatggccaacaagaccagaatcctggtgaccagcaagatggagcatctgaagaaggccgacaagatcctgatcctgcacgaggggtccagctacttctacggcaccttcagcgagctgcagaacctgcagcccgacttcagctccaagctgatgggctgcgatagcttcgaccagttctccgccgagagaaggaactccattctgaccgagaccctgcaccgattctccctggagggagacgccccagtgagctggaccgagaccaagaagcagagcttcaagcagaccggcgagttcggagagaagcgcaagaactccatcctcaaccccatcaacagcatccggaagttcagcatcgtgcagaagacccctctgcagatgaacgggatcgaggaggacagcgacgagcccctggaacggcgactgtccctcgtgcccgacagcgagcagggcgaggccatcctgccccggatctccgtgatctccactgggcccaccctgcaagcccgacggcggcaaagcgtgctgaacctgatgacccacagcgtgaaccagggccagaatatccaccgcaagactacagccagcacccgcaaggtgagcctggctccccaggccaacctgaccgagctggacatctacagcaggaggctgagccaggagacaggcctggagatcagcgaggagatcaacgaggaggacctgaaggagtgcttcttcgacgacatggagtccatccccgccgtgaccacctggaacacctacctgagatacatcaccgtgcacaagagcctgatcttcgtgctgatctggtgcctggtgatcttcttggccgaggtagccgcctcactggtggtgctgtggctgctgggcaataccccactgcaggacaaggggaactccacccacagccggaacaacagctacgccgtgatcatcacctccaccagcagctactacgtgttctacatctacgtgggcgtggccgacacactgctggccatgggcttcttcagaggcctccctctggtgcacacactgatcaccgtgagcaagatcctgcaccacaagatgctgcacagcgtgctgcaggctcccatgtcaaccctgaacaccctgaaggccggcggcatcctgaacaggttcagcaaggacatcgccattctggacgatctgctgcccctgaccatcttcgacttcatccagctgctgctgatcgtgatcggggccatcgccgtggtggccgtgctgcagccctacatcttcgtggccacagtgcccgtgatcgtggccttcatcatgctgcgcgcctacttcctgcagacctcccagcagctgaagcagctggagagcgaaggccgcagccccatcttcacccacctggtgactagcctgaaggggctgtggaccctgcgcgccttcggcaggcagccctacttcgagaccctgttccacaaggctctgaacctgcacaccgccaactggttcctgtacctcagcaccctgcgctggttccagatgcggatcgagatgatcttcgtgatcttcttcatcgccgtgaccttcatctccatcctgaccaccggggaaggcgagggacgggtgggaatcatcctgaccctggccatgaatatcatgagcaccctgcagtgggccgtgaacagcagcatcgacgtggacagcctgatgcggtccgtgtcccgggtgttcaagttcatcgacatgcccaccgagggcaagcccaccaagagcaccaagccctacaagaacggccagctgagcaaggtgatgattatcgagaacagccacgtgaagaaggacgacatctggccttccggcggccagatgaccgtgaaggacctgaccgccaagtacaccgagggcggcaacgccatcctggagaacatcagcttctccattagccctggacagcgggtgggcctgttgggacggaccggcagtgggaagagcaccctgctgtccgccttcctgcggctgctgaacacggagggcgagatccagatcgacggggtgagctgggacagcatcaccctgcagcagtggcgaaaggccttcggcgtgatcccacagaaggtgtttattttctctggcacctttaggaagaacctggacccctacgagcagtggtccgaccaggagatctggaaggtggccgacgaggtgggcctgcggtcagtgatcgagcagttccccggcaagctggacttcgtgctggtggacggcggctgcgtgctgagccacggccacaagcagctgatgtgcctggcacgcagcgtgctgagcaaggccaagatcctgctgctggacgagccctccgcgcacctggatcccgtgacctaccagatcatcaggcggaccctgaagcaggccttcgccgactgcaccgtgatcctgtgcgagagcagaatcgaggctatgctggagtgccagcagttcctggtgatcgaggagaacaaggtgcggcagtacgactccatccagaagctgctgaacgagcgcagcctgttcagacaggctatctctcccagcgatcgcgtgaagctgttccctcacaggaacagcagcaagtgcaagtctaagccacagatcgccgccctgaaggaggagaccgaggaggaggtgcaggatacccgcctgtaaagctccccgggggcctcggtggcctagcttcttgccccttgggcctccccccagcccctcctccccttcctgcacccgtacccccgtggtctttgaataaagtctgagtgggcggc

SEQ ID NO: 37 - RNA, 4538 nt, synthetic construct
  source 1..4538: mol_type = other RNA
ggaaatcgcaaaatttgctcttcgcgttagatttcttttagttttctcgcaactagcaagctttttgttctcgccatgcagcggagccctctggagaaggccagcgtggtgagcaagctgttcttcagctggaccaggcccatcctgcgaaagggctacagacagaggctggagctgtccgacatctaccagattccatccgtggacagcgccgacaatctgagcgagaagctggagagggagtgggaccgcgagctggccagcaagaagaaccctaagctgatcaacgccctgcgccgctgcttcttctggaggttcatgttctacggcatcttcctgtacctgggcgaggtgaccaaggccgtccagcctctgctgctgggccgcatcatcgccagctacgatcccgacaacaaggaggaacgctccatcgccatctacctgggcatcggcctgtgtctgctgttcatcgtgcggaccctgctgctgcaccccgccatcttcggcctgcatcacatcggcatgcagatgaggatcgccatgttctccctgatctacaagaagaccctgaagctgtccagccgcgtgctggataagatcagcatcgggcagctggtgagcctgctgagcaacaacctgaacaagttcgacgaggggttggcgctggcccacttcgtgtggattgccccgctgcaggtggctctgctgatggggctgatctgggagctgctgcaggcctctgccttctgcgggctggggtttctgatcgtgctggccctgttccaagctggcctgggccgcatgatgatgaagtaccgcgatcagagggccggcaagatcagcgagcgcctggtgatcactagcgagatgatagagaacatccagagcgtgaaggcttactgttgggaggaggccatggagaagatgatcgagaacctgaggcagaccgagctgaagctgactagaaaggcagcctacgtgaggtatttcaactccagcgccttcttcttcagcggcttcttcgtggtgttcctgagcgtgctgccctacgccctgatcaagggcatcatcctgaggaagatcttcaccaccattagcttctgcatcgtgctgcgcatggccgtgaccaggcagttcccttgggccgtgcagacttggtacgacagcctgggagccatcaacaagatccaggactttctgcagaagcaggaatataagaccctggagtacaacctgaccaccaccgaggtggtgatggagaacgtgaccgccttctgggaggagctgggcacccctgtgctgaaggacatcaacttcaagatcgaaagaggccaactgctggccgtggccggatctaccggcgccggcaagaccagcctgctgatgatgatcatgggcgagctggagcccagcgagggcaagatcaagcacagcggccggatctccttctgcccacagttctcctggatcatgcccggcaccatcaaggagaacatcatcttcggcgtgagctacgacgagtacaggtaccggagcgtgatcaaggcctgccagctggaggaggacatctccaaatttcccgagaaggacaacaccgtgctgggcgaaggcgggatcaccctgtccggtggccagcgtgcacgcatctccctggcccgggctgtgtacaaggacgccgacctgtacctgctggacagcccttttggctacctggacgtgctgaccgagaaggagatcttcgagtcctgcgtgtgtaagctgatggccaacaagaccagaatcctggtgaccagcaagatggagcatctgaagaaggccgacaagatcctgatcctgcacgaggggtccagctacttctacggcaccttcagcgagctgcagaacctgcagcccgacttcagctccaagctgatgggctgcgatagcttcgaccagttctccgccgagagaaggaactccattctgaccgagaccctgcaccgattctccctggagggagacgccccagtgagctggaccgagaccaagaagcagagcttcaagcagaccggcgagttcggagagaagcgcaagaactccatcctcaaccccatcaacagcatccggaagttcagcatcgtgcagaagacccctctgcagatgaacgggatcgaggaggacagcgacgagcccctggaacggcgactgtccctcgtgcccgacagcgagcagggcgaggccatcctgccccggatctccgtgatctccactgggcccaccctgcaagcccgacggcggcaaagcgtgctgaacctgatgacccacagcgtgaaccagggccagaatatccaccgcaagactacagccagcacccgcaaggtgagcctggctccccaggccaacctgaccgagctggacatctacagcaggaggctgagccaggagacaggcctggagatcagcgaggagatcaacgaggaggacctgaaggagtgcttcttcgacgacatggagtccatccccgccgtgaccacctggaacacctacctgagatacatcaccgtgcacaagagcctgatcttcgtgctgatctggtgcctggtgatcttcttggccgaggtagccgcctcactggtggtgctgtggctgctgggcaataccccactgcaggacaaggggaactccacccacagccggaacaacagctacgccgtgatcatcacctccaccagcagctactacgtgttctacatctacgtgggcgtggccgacacactgctggccatgggcttcttcagaggcctccctctggtgcacacactgatcaccgtgagcaagatcctgcaccacaagatgctgcacagcgtgctgcaggctcccatgtcaaccctgaacaccctgaaggccggcggcatcctgaacaggttcagcaaggacatcgccattctggacgatctgctgcccctgaccatcttcgacttcatccagctgctgctgatcgtgatcggggccatcgccgtggtggccgtgctgcagccctacatcttcgtggccacagtgcccgtgatcgtggccttcatcatgctgcgcgcctacttcctgcagacctcccagcagctgaagcagctggagagcgaaggccgcagccccatcttcacccacctggtgactagcctgaaggggctgtggaccctgcgcgccttcggcaggcagccctacttcgagaccctgttccacaaggctctgaacctgcacaccgccaactggttcctgtacctcagcaccctgcgctggttccagatgcggatcgagatgatcttcgtgatcttcttcatcgccgtgaccttcatctccatcctgaccaccggggaaggcgagggacgggtgggaatcatcctgaccctggccatgaatatcatgagcaccctgcagtgggccgtgaacagcagcatcgacgtggacagcctgatgcggtccgtgtcccgggtgttcaagttcatcgacatgcccaccgagggcaagcccaccaagagcaccaagccctacaagaacggccagctgagcaaggtgatgattatcgagaacagccacgtgaagaaggacgacatctggccttccggcggccagatgaccgtgaaggacctgaccgccaagtacaccgagggcggcaacgccatcctggagaacatcagcttctccattagccctggacagcgggtgggcctgttgggacggaccggcagtgggaagagcaccctgctgtccgccttcctgcggctgctgaacacggagggcgagatccagatcgacggggtgagctgggacagcatcaccctgcagcagtggcgaaaggccttcggcgtgatcccacagaaggtgtttattttctctggcacctttaggaagaacctggacccctacgagcagtggtccgaccaggagatctggaaggtggccgacgaggtgggcctgcggtcagtgatcgagcagttccccggcaagctggacttcgtgctggtggacggcggctgcgtgctgagccacggccacaagcagctgatgtgcctggcacgcagcgtgctgagcaaggccaagatcctgctgctggacgagccctccgcgcacctggatcccgtgacctaccagatcatcaggcggaccctgaagcaggccttcgccgactgcaccgtgatcctgtgcgagagcagaatcgaggctatgctggagtgccagcagttcctggtgatcgaggagaacaaggtgcggcagtacgactccatccagaagctgctgaacgagcgcagcctgttcagacaggctatctctcccagcgatcgcgtgaagctgttccctcacaggaacagcagcaagtgcaagtctaagccacagatcgccgccctgaaggaggagaccgaggaggaggtgcaggatacccgcctgtaaagctccccgggggcctcggtggcctagcttcttgccccttgggcctccccccagcccctcctccccttcctgcacccgtacccccgtggtctttgaataaagtctgagtgggcggc

SEQ ID NO: 38 - RNA, 4653 nt, synthetic construct
  source 1..4653: mol_type = other RNA
ggaaatttttttttgatattataagagtttttttttgatattaagaaaatttttttttgatattagaagagtaagaagaaatataagaccccggcgccgccaccatgcaaagaagtccattagagaaagcgtcggttgtgagcaagctgttcttcagctggaccaggcccatcctgcgaaagggctacagacagaggctggagctgtccgacatctaccagattccatccgtggacagcgccgacaatctgagcgagaagctggagagggagtgggaccgcgagctggccagcaagaagaaccctaagctgatcaacgccctgcgccgctgcttcttctggaggttcatgttctacggcatcttcctgtacctgggcgaggtgaccaaggccgtccagcctctgctgctgggccgcatcatcgccagctacgatcccgacaacaaggaggaacgctccatcgccatctacctgggcatcggcctgtgtctgctgttcatcgtgcggaccctgctgctgcaccccgccatcttcggcctgcatcacatcggcatgcagatgaggatcgccatgttctccctgatctacaagaagaccctgaagctgtccagccgcgtgctggataagatcagcatcgggcagctggtgagcctgctgagcaacaacctgaacaagttcgacgaggggttggcgctggcccacttcgtgtggattgccccgctgcaggtggctctgctgatggggctgatctgggagctgctgcaggcctctgccttctgcgggctggggtttctgatcgtgctggccctgttccaagctggcctgggccgcatgatgatgaagtaccgcgatcagagggccggcaagatcagcgagcgcctggtgatcactagcgagatgatagagaacatccagagcgtgaaggcttactgttgggaggaggccatggagaagatgatcgagaacctgaggcagaccgagctgaagctgactagaaaggcagcctacgtgaggtatttcaactccagcgccttcttcttcagcggcttcttcgtggtgttcctgagcgtgctgccctacgccctgatcaagggcatcatcctgaggaagatcttcaccaccattagcttctgcatcgtgctgcgcatggccgtgaccaggcagttcccttgggccgtgcagacttggtacgacagcctgggagccatcaacaagatccaggactttctgcagaagcaggaatataagaccctggagtacaacctgaccaccaccgaggtggtgatggagaacgtgaccgccttctgggaggagggcttcggcgagctgttcgagaaggccaagcagaacaataacaaccgcaagaccagcaacggcgacgactccctcttcttcagcaactttagcctgctgggcacccctgtgctgaaggacatcaacttcaagatcgaaagaggccaactgctggccgtggccggatctaccggcgccggcaagaccagcctgctgatgatgatcatgggcgagctggagcccagcgagggcaagatcaagcacagcggccggatctccttctgctcccagttctcctggatcatgcccggcaccatcaaggagaacatcatcttcggcgtgagctacgacgagtacaggtaccggagcgtgatcaaggcctgccagctggaggaggacatctccaaatttgccgagaaggacaacattgtgctgggcgaaggcgggatcaccctgtccggtggccagcgtgcacgcatctccctggcccgggctgtgtacaaggacgccgacctgtacctgctggacagcccttttggctacctggacgtgctgaccgagaaggagatcttcgagtcctgcgtgtgtaagctgatggccaacaagaccagaatcctggtgaccagcaagatggagcatctgaagaaggccgacaagatcctgatcctgcacgaggggtccagctacttctacggcaccttcagcgagctgcagaacctgcagcccgacttcagctccaagctgatgggctgcgatagcttcgaccagttctccgccgagagaaggaactccattctgaccgagaccctgcaccgattctccctggagggagacgccccagtgagctggaccgagaccaagaagcagagcttcaagcagaccggcgagttcggagagaagcgcaagaactccatcctcaaccccatcaacagcatccggaagttcagcatcgtgcagaagacccctctgcagatgaacgggatcgaggaggacagcgacgagcccctggaacggcgactgtccctcgtgcccgacagcgagcagggcgaggccatcctgccccggatctccgtgatctccactgggcccaccctgcaagcccgacggcggcaaagcgtgctgaacctgatgacccacagcgtgaaccagggccagaatatccaccgcaagactacagccagcacccgcaaggtgagcctggctccccaggccaacctgaccgagctggacatctacagcaggaggctgagccaggagacaggcctggagatcagcgaggagatcaacgaggaggacctgaaggagtgcttcttcgacgacatggagtccatccccgccgtgaccacctggaacacctacctgagatacatcaccgtgcacaagagcctgatcttcgtgctgatctggtgcctggtgatcttcttggccgaggtagccgcctcactggtggtgctgtggctgctgggcaataccccactgcaggacaaggggaactccacccacagccggaacaacagctacgccgtgatcatcacctccaccagcagctactacgtgttctacatctacgtgggcgtggccgacacactgctggccatgggcttcttcagaggcctccctctggtgcacacactgatcaccgtgagcaagatcctgcaccacaagatgctgcacagcgtgctgcaggctcccatgtcaaccctgaacaccctgaaggccggcggcatcctgaacaggttcagcaaggacatcgccattctggacgatctgctgcccctgaccatcttcgacttcatccagctgctgctgatcgtgatcggggccatcgccgtggtggccgtgctgcagccctacatcttcgtggccacagtgcccgtgatcgtggccttcatcatgctgcgcgcctacttcctgcagacctcccagcagctgaagcagctggagagcgaaggccgcagccccatcttcacccacctggtgactagcctgaaggggctgtggaccctgcgcgccttcggcaggcagccctacttcgagaccctgttccacaaggctctgaacctgcacaccgccaactggttcctgtacctcagcaccctgcgctggttccagatgcggatcgagatgatcttcgtgatcttcttcatcgccgtgaccttcatctccatcctgaccaccggggaaggcgagggacgggtgggaatcatcctgaccctggccatgaatatcatgagcaccctgcagtgggccgtgaacagcagcatcgacgtggacagcctgatgcggtccgtgtcccgggtgttcaagttcatcgacatgcccaccgagggcaagcccaccaagagcaccaagccctacaagaacggccagctgagcaaggtgatgattatcgagaacagccacgtgaagaaggacgacatctggccttccggcggccagatgaccgtgaaggacctgaccgccaagtacaccgagggcggcaacgccatcctggagaacatcagcttctccattagccctggacagcgggtgggcctgttgggacggaccggcagtgggaagagcaccctgctgtccgccttcctgcggctgctgaacacggagggcgagatccagatcgacggggtgagctgggacagcatcaccctgcagcagtggcgaaaggccttcggcgtgatcccacagaaggtgtttattttctctggcacctttaggaagaacctggacccctacgagcagtggtccgaccaggagatctggaaggtggccgacgaggtgggcctgcggtcagtgatcgagcagttccccggcaagctggacttcgtgctggtggacggcggctgcgtgctgagccacggccacaagcagctgatgtgcctggcacgcagcgtgctgagcaaggccaagatcctgctgctggacgagccctccgcgcacctggatcccgtgacctaccagatcatcaggcggaccctgaagcaggccttcgccgactgcaccgtgatcctgtgcgagagcagaatcgaggctatgctggagtgccagcagttcctggtgatcgaggagaacaaggtgcggcagtacgactccatccagaagctgctgaacgagcgcagcctgttcagacaggctatctctcccagcgatcgcgtgaagctgttccctcacaggaacagcagcaagtgcaagtctaagccacagatcgccgccctgaaggaggagaccgaggaggaggtgcaggatacccgcctgtaaagctccccgggggcctccaccgcgttatccgttcctcgtaggctggtcctggggaacgggtcggcgggtacccccgtggtctttgaataaagtctgagtgggcggc

SEQ ID NO: 39 - RNA, 4653 nt, synthetic construct
  source 1..4653: mol_type = other RNA
ggaaatttttttttgatattataagagtttttttttgatattaagaaaatttttttttgatattagaagagtaagaagaaatataagaccccggcgccgccaccatgcagcggagccctctggagaaggccagcgtggtgagcaagctgttcttcagctggaccaggcccatcctgcgaaagggctacagacagaggctggagctgtccgacatctaccagattccatccgtggacagcgccgacaatctgagcgagaagctggagagggagtgggaccgcgagctggccagcaagaagaaccctaagctgatcaacgccctgcgccgctgcttcttctggaggttcatgttctacggcatcttcctgtacctgggcgaggtgaccaaggccgtccagcctctgctgctgggccgcatcatcgccagctacgatcccgacaacaaggaggaacgctccatcgccatctacctgggcatcggcctgtgtctgctgttcatcgtgcggaccctgctgctgcaccccgccatcttcggcctgcatcacatcggcatgcagatgaggatcgccatgttctccctgatctacaagaagaccctgaagctgtccagccgcgtgctggataagatcagcatcgggcagctggtgagcctgctgagcaacaacctgaacaagttcgacgaggggttggcgctggcccacttcgtgtggattgccccgctgcaggtggctctgctgatggggctgatctgggagctgctgcaggcctctgccttctgcgggctggggtttctgatcgtgctggccctgttccaagctggcctgggccgcatgatgatgaagtaccgcgatcagagggccggcaagatcagcgagcgcctggtgatcactagcgagatgatagagaacatccagagcgtgaaggcttactgttgggaggaggccatggagaagatgatcgagaacctgaggcagaccgagctgaagctgactagaaaggcagcctacgtgaggtatttcaactccagcgccttcttcttcagcggcttcttcgtggtgttcctgagcgtgctgccctacgccctgatcaagggcatcatcctgaggaagatcttcaccaccattagcttctgcatcgtgctgcgcatggccgtgaccaggcagttcccttgggccgtgcagacttggtacgacagcctgggagccatcaacaagatccaggactttctgcagaagcaggaatataagaccctggagtacaacctgaccaccaccgaggtggtgatggagaacgtgaccgccttctgggaggagggcttcggcgagctgttcgagaaggccaagcagaacaataacaaccgcaagaccagcaacggcgacgactccctcttcttcagcaactttagcctgctgggcacccctgtgctgaaggacatcaacttcaagatcgaaagaggccaactgctggccgtggccggatctaccggcgccggcaagaccagcctgctgatgatgatcatgggcgagctggagcccagcgagggcaagatcaagcacagcggccggatctccttctgctcccagttctcctggatcatgcccggcaccatcaaggagaacatcatcttcggcgtgagctacgacgagtacaggtaccggagcgtgatcaaggcctgccagctggaggaggacatctccaaatttgccgagaaggacaacattgtgctgggcgaaggcgggatcaccctgtccggtggccagcgtgcacgcatctccctggcccgggctgtgtacaaggacgccgacctgtacctgctggacagcccttttggctacctggacgtgctgaccgagaaggagatcttcgagtcctgcgtgtgtaagctgatggccaacaagaccagaatcctggtgaccagcaagatggagcatctgaagaaggccgacaagatcctgatcctgcacgaggggtccagctacttctacggcaccttcagcgagctgcagaacctgcagcccgacttcagctccaagctgatgggctgcgatagcttcgaccagttctccgccgagagaaggaactccattctgaccgagaccctgcaccgattctccctggagggagacgccccagtgagctggaccgagaccaagaagcagagcttcaagcagaccggcgagttcggagagaagcgcaagaactccatcctcaaccccatcaacagcatccggaagttcagcatcgtgcagaagacccctctgcagatgaacgggatcgaggaggacagcgacgagcccctggaacggcgactgtccctcgtgcccgacagcgagcagggcgaggccatcctgccccggatctccgtgatctccactgggcccaccctgcaagcccgacggcggcaaagcgtgctgaacctgatgacccacagcgtgaaccagggccagaatatccaccgcaagactacagccagcacccgcaaggtgagcctggctccccaggccaacctgaccgagctggacatctacagcaggaggctgagccaggagacaggcctggagatcagcgaggagatcaacgaggaggacctgaaggagtgcttcttcgacgacatggagtccatccccgccgtgaccacctggaacacctacctgagatacatcaccgtgcacaagagcctgatcttcgtgctgatctggtgcctggtgatcttcttggccgaggtagccgcctcactggtggtgctgtggctgctgggcaataccccactgcaggacaaggggaactccacccacagccggaacaacagctacgccgtgatcatcacctccaccagcagctactacgtgttctacatctacgtgggcgtggccgacacactgctggccatgggcttcttcagaggcctccctctggtgcacacactgatcaccgtgagcaagatcctgcaccacaagatgctgcacagcgtgctgcaggctcccatgtcaaccctgaacaccctgaaggccggcggcatcctgaacaggttcagcaaggacatcgccattctggacgatctgctgcccctgaccatcttcgacttcatccagctgctgctgatcgtgatcggggccatcgccgtggtggccgtgctgcagccctacatcttcgtggccacagtgcccgtgatcgtggccttcatcatgctgcgcgcctacttcctgcagacctcccagcagctgaagcagctggagagcgaaggccgcagccccatcttcacccacctggtgactagcctgaaggggctgtggaccctgcgcgccttcggcaggcagccctacttcgagaccctgttccacaaggctctgaacctgcacaccgccaactggttcctgtacctcagcaccctgcgctggttccagatgcggatcgagatgatcttcgtgatcttcttcatcgccgtgaccttcatctccatcctgaccaccggggaaggcgagggacgggtgggaatcatcctgaccctggccatgaatatcatgagcaccctgcagtgggccgtgaacagcagcatcgacgtggacagcctgatgcggtccgtgtcccgggtgttcaagttcatcgacatgcccaccgagggcaagcccaccaagagcaccaagccctacaagaacggccagctgagcaaggtgatgattatcgagaacagccacgtgaagaaggacgacatctggccttccggcggccagatgaccgtgaaggacctgaccgccaagtacaccgagggcggcaacgccatcctggagaacatcagcttctccattagccctggacagcgggtgggcctgttgggacggaccggcagtgggaagagcaccctgctgtccgccttcctgcggctgctgaacacggagggcgagatccagatcgacggggtgagctgggacagcatcaccctgcagcagtggcgaaaggccttcggcgtgatcccacagaaggtgtttattttctctggcacctttaggaagaacctggacccctacgagcagtggtccgaccaggagatctggaaggtggccgacgaggtgggcctgcggtcagtgatcgagcagttccccggcaagctggacttcgtgctggtggacggcggctgcgtgctgagccacggccacaagcagctgatgtgcctggcacgcagcgtgctgagcaaggccaagatcctgctgctggacgagccctccgcgcacctggatcccgtgacctaccagatcatcaggcggaccctgaagcaggccttcgccgactgcaccgtgatcctgtgcgagagcagaatcgaggctatgctggagtgccagcagttcctggtgatcgaggagaacaaggtgcggcagtacgactccatccagaagctgctgaacgagcgcagcctgttcagacaggctatctctcccagcgatcgcgtgaagctgttccctcacaggaacagcagcaagtgcaagtctaagccacagatcgccgccctgaaggaggagaccgaggaggaggtgcaggatacccgcctgtaaagctccccgggggcctccaccgcgttatccgttcctcgtaggctggtcctggggaacgggtcggcgggtacccccgtggtctttgaataaagtctgagtgggcggc

SEQ ID NO: 40 - RNA, 4624 nt, synthetic construct
  source 1..4624: mol_type = other RNA
ggaaatcgcaaaatttgctcttcgcgttagatttcttttagttttctcgcaactagcaagctttttgttctcgccatgcagcggagccctctggagaaggccagcgtggtgagcaagctgttcttcagctggaccaggcccatcctgcgaaagggctacagacagaggctggagctgtccgacatctaccagattccatccgtggacagcgccgacaatctgagcgagaagctggagagggagtgggaccgcgagctggccagcaagaagaaccctaagctgatcaacgccctgcgccgctgcttcttctggaggttcatgttctacggcatcttcctgtacctgggcgaggtgaccaaggccgtccagcctctgctgctgggccgcatcatcgccagctacgatcccgacaacaaggaggaacgctccatcgccatctacctgggcatcggcctgtgtctgctgttcatcgtgcggaccctgctgctgcaccccgccatcttcggcctgcatcacatcggcatgcagatgaggatcgccatgttctccctgatctacaagaagaccctgaagctgtccagccgcgtgctggataagatcagcatcgggcagctggtgagcctgctgagcaacaacctgaacaagttcgacgaggggttggcgctggcccacttcgtgtggattgccccgctgcaggtggctctgctgatggggctgatctgggagctgctgcaggcctctgccttctgcgggctggggtttctgatcgtgctggccctgttccaagctggcctgggccgcatgatgatgaagtaccgcgatcagagggccggcaagatcagcgagcgcctggtgatcactagcgagatgatagagaacatccagagcgtgaaggcttactgttgggaggaggccatggagaagatgatcgagaacctgaggcagaccgagctgaagctgactagaaaggcagcctacgtgaggtatttcaactccagcgccttcttcttcagcggcttcttcgtggtgttcctgagcgtgctgccctacgccctgatcaagggcatcatcctgaggaagatcttcaccaccattagcttctgcatcgtgctgcgcatggccgtgaccaggcagttcccttgggccgtgcagacttggtacgacagcctgggagccatcaacaagatccaggactttctgcagaagcaggaatataagaccctggagtacaacctgaccaccaccgaggtggtgatggagaacgtgaccgccttctgggaggagggcttcggcgagctgttcgagaaggccaagcagaacaataacaaccgcaagaccagcaacggcgacgactccctcttcttcagcaactttagcctgctgggcacccctgtgctgaaggacatcaacttcaagatcgaaagaggccaactgctggccgtggccggatctaccggcgccggcaagaccagcctgctgatgatgatcatgggcgagctggagcccagcgagggcaagatcaagcacagcggccggatctccttctgctcccagttctcctggatcatgcccggcaccatcaaggagaacatcatcttcggcgtgagctacgacgagtacaggtaccggagcgtgatcaaggcctgccagctggaggaggacatctccaaatttgccgagaaggacaacattgtgctgggcgaaggcgggatcaccctgtccggtggccagcgtgcacgcatctccctggcccgggctgtgtacaaggacgccgacctgtacctgctggacagcccttttggctacctggacgtgctgaccgagaaggagatcttcgagtcctgcgtgtgtaagctgatggccaacaagaccagaatcctggtgaccagcaagatggagcatctgaagaaggccgacaagatcctgatcctgcacgaggggtccagctacttctacggcaccttcagcgagctgcagaacctgcagcccgacttcagctccaagctgatgggctgcgatagcttcgaccagttctccgccgagagaaggaactccattctgaccgagaccctgcaccgattctccctggagggagacgccccagtgagctggaccgagaccaagaagcagagcttcaagcagaccggcgagttcggagagaagcgcaagaactccatcctcaaccccatcaacagcatccggaagttcagcatcgtgcagaagacccctctgcagatgaacgggatcgaggaggacagcgacgagcccctggaacggcgactgtccctcgtgcccgacagcgagcagggcgaggccatcctgccccggatctccgtgatctccactgggcccaccctgcaagcccgacggcggcaaagcgtgctgaacctgatgacccacagcgtgaaccagggccagaatatccaccgcaagactacagccagcacccgcaaggtgagcctggctccccaggccaacctgaccgagctggacatctacagcaggaggctgagccaggagacaggcctggagatcagcgaggagatcaacgaggaggacctgaaggagtgcttcttcgacgacatggagtccatccccgccgtgaccacctggaacacctacctgagatacatcaccgtgcacaagagcctgatcttcgtgctgatctggtgcctggtgatcttcttggccgaggtagccgcctcactggtggtgctgtggctgctgggcaataccccactgcaggacaaggggaactccacccacagccggaacaacagctacgccgtgatcatcacctccaccagcagctactacgtgttctacatctacgtgggcgtggccgacacactgctggccatgggcttcttcagaggcctccctctggtgcacacactgatcaccgtgagcaagatcctgcaccacaagatgctgcacagcgtgctgcaggctcccatgtcaaccctgaacaccctgaaggccggcggcatcctgaacaggttcagcaaggacatcgccattctggacgatctgctgcccctgaccatcttcgacttcatccagctgctgctgatcgtgatcggggccatcgccgtggtggccgtgctgcagccctacatcttcgtggccacagtgcccgtgatcgtggccttcatcatgctgcgcgcctacttcctgcagacctcccagcagctgaagcagctggagagcgaaggccgcagccccatcttcacccacctggtgactagcctgaaggggctgtggaccctgcgcgccttcggcaggcagccctacttcgagaccctgttccacaaggctctgaacctgcacaccgccaactggttcctgtacctcagcaccctgcgctggttccagatgcggatcgagatgatcttcgtgatcttcttcatcgccgtgaccttcatctccatcctgaccaccggggaaggcgagggacgggtgggaatcatcctgaccctggccatgaatatcatgagcaccctgcagtgggccgtgaacagcagcatcgacgtggacagcctgatgcggtccgtgtcccgggtgttcaagttcatcgacatgcccaccgagggcaagcccaccaagagcaccaagccctacaagaacggccagctgagcaaggtgatgattatcgagaacagccacgtgaagaaggacgacatctggccttccggcggccagatgaccgtgaaggacctgaccgccaagtacaccgagggcggcaacgccatcctggagaacatcagcttctccattagccctggacagcgggtgggcctgttgggacggaccggcagtgggaagagcaccctgctgtccgccttcctgcggctgctgaacacggagggcgagatccagatcgacggggtgagctgggacagcatcaccctgcagcagtggcgaaaggccttcggcgtgatcccacagaaggtgtttattttctctggcacctttaggaagaacctggacccctacgagcagtggtccgaccaggagatctggaaggtggccgacgaggtgggcctgcggtcagtgatcgagcagttccccggcaagctggacttcgtgctggtggacggcggctgcgtgctgagccacggccacaagcagctgatgtgcctggcacgcagcgtgctgagcaaggccaagatcctgctgctggacgagccctccgcgcacctggatcccgtgacctaccagatcatcaggcggaccctgaagcaggccttcgccgactgcaccgtgatcctgtgcgagagcagaatcgaggctatgctggagtgccagcagttcctggtgatcgaggagaacaaggtgcggcagtacgactccatccagaagctgctgaacgagcgcagcctgttcagacaggctatctctcccagcgatcgcgtgaagctgttccctcacaggaacagcagcaagtgcaagtctaagccacagatcgccgccctgaaggaggagaccgaggaggaggtgcaggatacccgcctgtaaagctccccgggggcctccaccgcgttatccgttcctcgtaggctggtcctggggaacgggtcggcgggtacccccgtggtctttgaataaagtctgagtgggcggc

SEQ ID NO: 41 - RNA, 4528 nt, synthetic construct
  source 1..4528: mol_type = other RNA
ggaaatcgcaaaatttgctcttcgcgttagatttcttttagttttctcgcaactagcaagctttttgttctcgccatgcagcggagccctctggagaaggccagcgtggtgagcaagctgttcttcagctggaccaggcccatcctgcgaaagggctacagacagaggctggagctgtccgacatctaccagattccatccgtggacagcgccgacaatctgagcgagaagctggagagggagtgggaccgcgagctggccagcaagaagaaccctaagctgatcaacgccctgcgccgctgcttcttctggaggttcatgttctacggcatcttcctgtacctgggcgaggtgaccaaggccgtccagcctctgctgctgggccgcatcatcgccagctacgatcccgacaacaaggaggaacgctccatcgccatctacctgggcatcggcctgtgtctgctgttcatcgtgcggaccctgctgctgcaccccgccatcttcggcctgcatcacatcggcatgcagatgaggatcgccatgttctccctgatctacaagaagaccctgaagctgtccagccgcgtgctggataagatcagcatcgggcagctggtgagcctgctgagcaacaacctgaacaagttcgacgaggggttggcgctggcccacttcgtgtggattgccccgctgcaggtggctctgctgatggggctgatctgggagctgctgcaggcctctgccttctgcgggctggggtttctgatcgtgctggccctgttccaagctggcctgggccgcatgatgatgaagtaccgcgatcagagggccggcaagatcagcgagcgcctggtgatcactagcgagatgatagagaacatccagagcgtgaaggcttactgttgggaggaggccatggagaagatgatcgagaacctgaggcagaccgagctgaagctgactagaaaggcagcctacgtgaggtatttcaactccagcgccttcttcttcagcggcttcttcgtggtgttcctgagcgtgctgccctacgccctgatcaagggcatcatcctgaggaagatcttcaccaccattagcttctgcatcgtgctgcgcatggccgtgaccaggcagttcccttgggccgtgcagacttggtacgacagcctgggagccatcaacaagatccaggactttctgcagaagcaggaatataagaccctggagtacaacctgaccaccaccgaggtggtgatggagaacgtgaccgccttctgggaggagctgggcacccctgtgctgaaggacatcaacttcaagatcgaaagaggccaactgctggccgtggccggatctaccggcgccggcaagaccagcctgctgatgatgatcatgggcgagctggagcccagcgagggcaagatcaagcacagcggccggatctccttctgcccacagttctcctggatcatgcccggcaccatcaaggagaacatcatcttcggcgtgagctacgacgagtacaggtaccggagcgtgatcaaggcctgccagctggaggaggacatctccaaatttcccgagaaggacaacaccgtgctgggcgaaggcgggatcaccctgtccggtggccagcgtgcacgcatctccctggcccgggctgtgtacaaggacgccgacctgtacctgctggacagcccttttggctacctggacgtgctgaccgagaaggagatcttcgagtcctgcgtgtgtaagctgatggccaacaagaccagaatcctggtgaccagcaagatggagcatctgaagaaggccgacaagatcctgatcctgcacgaggggtccagctacttctacggcaccttcagcgagctgcagaacctgcagcccgacttcagctccaagctgatgggctgcgatagcttcgaccagttctccgccgagagaaggaactccattctgaccgagaccctgcaccgattctccctggagggagacgccccagtgagctggaccgagaccaagaagcagagcttcaagcagaccggcgagttcggagagaagcgcaagaactccatcctcaaccccatcaacagcatccggaagttcagcatcgtgcagaagacccctctgcagatgaacgggatcgaggaggacagcgacgagcccctggaacggcgactgtccctcgtgcccgacagcgagcagggcgaggccatcctgccccggatctccgtgatctccactgggcccaccctgcaagcccgacggcggcaaagcgtgctgaacctgatgacccacagcgtgaaccagggccagaatatccaccgcaagactacagccagcacccgcaaggtgagcctggctccccaggccaacctgaccgagctggacatctacagcaggaggctgagccaggagacaggcctggagatcagcgaggagatcaacgaggaggacctgaaggagtgcttcttcgacgacatggagtccatccccgccgtgaccacctggaacacctacctgagatacatcaccgtgcacaagagcctgatcttcgtgctgatctggtgcctggtgatcttcttggccgaggtagccgcctcactggtggtgctgtggctgctgggcaataccccactgcaggacaaggggaactccacccacagccggaacaacagctacgccgtgatcatcacctccaccagcagctactacgtgttctacatctacgtgggcgtggccgacacactgctggccatgggcttcttcagaggcctccctctggtgcacacactgatcaccgtgagcaagatcctgcaccacaagatgctgcacagcgtgctgcaggctcccatgtcaaccctgaacaccctgaaggccggcggcatcctgaacaggttcagcaaggacatcgccattctggacgatctgctgcccctgaccatcttcgacttcatccagctgctgctgatcgtgatcggggccatcgccgtggtggccgtgctgcagccctacatcttcgtggccacagtgcccgtgatcgtggccttcatcatgctgcgcgcctacttcctgcagacctcccagcagctgaagcagctggagagcgaaggccgcagccccatcttcacccacctggtgactagcctgaaggggctgtggaccctgcgcgccttcggcaggcagccctacttcgagaccctgttccacaaggctctgaacctgcacaccgccaactggttcctgtacctcagcaccctgcgctggttccagatgcggatcgagatgatcttcgtgatcttcttcatcgccgtgaccttcatctccatcctgaccaccggggaaggcgagggacgggtgggaatcatcctgaccctggccatgaatatcatgagcaccctgcagtgggccgtgaacagcagcatcgacgtggacagcctgatgcggtccgtgtcccgggtgttcaagttcatcgacatgcccaccgagggcaagcccaccaagagcaccaagccctacaagaacggccagctgagcaaggtgatgattatcgagaacagccacgtgaagaaggacgacatctggccttccggcggccagatgaccgtgaaggacctgaccgccaagtacaccgagggcggcaacgccatcctggagaacatcagcttctccattagccctggacagcgggtgggcctgttgggacggaccggcagtgggaagagcaccctgctgtccgccttcctgcggctgctgaacacggagggcgagatccagatcgacggggtgagctgggacagcatcaccctgcagcagtggcgaaaggccttcggcgtgatcccacagaaggtgtttattttctctggcacctttaggaagaacctggacccctacgagcagtggtccgaccaggagatctggaaggtggccgacgaggtgggcctgcggtcagtgatcgagcagttccccggcaagctggacttcgtgctggtggacggcggctgcgtgctgagccacggccacaagcagctgatgtgcctggcacgcagcgtgctgagcaaggccaagatcctgctgctggacgagccctccgcgcacctggatcccgtgacctaccagatcatcaggcggaccctgaagcaggccttcgccgactgcaccgtgatcctgtgcgagagcagaatcgaggctatgctggagtgccagcagttcctggtgatcgaggagaacaaggtgcggcagtacgactccatccagaagctgctgaacgagcgcagcctgttcagacaggctatctctcccagcgatcgcgtgaagctgttccctcacaggaacagcagcaagtgcaagtctaagccacagatcgccgccctgaaggaggagaccgaggaggaggtgcaggatacccgcctgtaaagctccccgggggcctccaccgcgttatccgttcctcgtaggctggtcctggggaacgggtcggcgggtacccccgtggtctttgaataaagtctgagtgggcggc

SEQ ID NO: 42-49 - skipped (8 entries)

SEQ ID NO: 50 - RNA, 75 nt, synthetic construct
  source 1..75: mol_type = other RNA
ggaaatcgcaaaatttgctcttcgcgttagatttcttttagttttctcgcaactagcaagctttttgttctcgcc

SEQ ID NO: 51 - RNA, 203 nt, synthetic construct
  source 1..203: mol_type = other RNA
ggaaatccccacaaccgcctcatatccaggctcaagaatagagctcagtgttttgttgtttaatcattccgacgtgttttgcgatattcgcgcaaagcagccagtcgcgcgcttgcttttaagtagagttgtttttccacccgtttgccaggcatctttaatttaacatatttttatttttcaggctaacctacgccgccacc

SEQ ID NO: 52 - RNA, 76 nt, synthetic construct
  source 1..76: mol_type = other RNA
ggaaataagagagaaaagaagagtaagaagaaatataagatctccctgagcttcagggagccccggcgccgccacc

SEQ ID NO: 53 - RNA, 89 nt, synthetic construct
  source 1..89: mol_type = other RNA
ggaaaccccccacccccgtaagagagaaaagaagagtaagaagaaatataagatctccctgagcttcagggagccccggcgccgccacc

SEQ ID NO: 54 - RNA, 59 nt, synthetic construct
  source 1..59: mol_type = other RNA
ggagaacttccgcttccgttggcgcaagcgctttcattttttctgctaccgtgactaag

SEQ ID NO: 55 - RNA, 46 nt, synthetic construct
  source 1..46: mol_type = other RNA
ggaaataagagagaaaagaagagtaagaagaaatataagagccacc

SEQ ID NO: 56 - RNA, 56 nt, synthetic construct
  source 1..56: mol_type = other RNA
ggaaataagagagaaaagaagagtaagaagaaatataagaccccggcgccgccacc

SEQ ID NO: 57 - RNA, 81 nt, synthetic construct
  source 1..81: mol_type = other RNA
ggaaatcgcaaaatttgctcttcgcgttagatttcttttagttttctcgcaactagcaagctttttgttctcgccgccgcc

SEQ ID NO: 58 - RNA, 81 nt, synthetic construct
  source 1..81: mol_type = other RNA
ggaaatcgcaaaattttcttttcgcgttagatttcttttagttttctttcaactagcaagctttttgttctcgccgccgcc

SEQ ID NO: 59 - RNA, 83 nt, synthetic construct
  source 1..83: mol_type = other RNA
  misc_difference 14..18: note = This region may encompass 0-5 nucleotides
  misc_difference 19: note = May be absent
  misc_difference 22: note = May be absent
  misc_difference 23..27: note = This region may encompass 0-5 nucleotides
  misc_difference 81..83: note = This region may be absent
ggaaatcgcaaaatttttgctctttttcgcgttagatttcttttagttttctykcaactagcaagctttttgttctcgccrcc

SEQ ID NO: 60 - RNA, 79 nt, synthetic construct
  source 1..79: mol_type = other RNA
ggaaaattttagcctggaacgttagataactgtcctgttgtctttatatacttggtccccaagtagtttgtcttccaaa

SEQ ID NO: 61 - RNA, 79 nt, synthetic construct
  source 1..79: mol_type = other RNA
ggaaactttatttagtgttactttattttctgtttatttgtgtttcttcagtgggtttgttctaatttccttggccgcc

SEQ ID NO: 62 - RNA, 79 nt, synthetic construct
  source 1..79: mol_type = other RNA
ggaaaatctgtattaggttggcgtgttctttggtcggttgttagtattgttgttgattcgtttgtggtcggttgccgcc

SEQ ID NO: 63 - RNA, 79 nt, synthetic construct
  source 1..79: mol_type = other RNA
ggaaaattattaacatcttggtattctcgataaccattcgttggattttattgtattcgtagtttgggttcctgccgcc

SEQ ID NO: 64 - RNA, 79 nt, synthetic construct
  source 1..79: mol_type = other RNA
ggaaattattattatttctagctacaatttatcattgtattattttagctattcatcattatttacttggtgatcaaca

SEQ ID NO: 65 - RNA, 79 nt, synthetic construct
  source 1..79: mol_type = other RNA
ggaaataggttgttaaccaagttcaagcctaataagcttggattctggtgacttgcttcaccgttggcgggcaccgatc

SEQ ID NO: 66 - RNA, 74 nt, synthetic construct
  source 1..74: mol_type = other RNA
ggaaatcgtagagagtcgtacttagtacatatcgactatcggtggacaccatcaagattataaaccaggccaga

SEQ ID NO: 67 - RNA, 79 nt, synthetic construct
  source 1..79: mol_type = other RNA
ggaaacccgcccaagcgaccccaacatatcagcagttgcccaatcccaactcccaacacaatccccaagcaacgccgcc

SEQ ID NO: 68 - RNA, 79 nt, synthetic construct
  source 1..79: mol_type = other RNA
ggaaagcgattgaaggcgtcttttcaactactcgattaaggttgggtatcgtcgtgggacttggaaatttgttgtttcc

SEQ ID NO: 69 - RNA, 79 nt, synthetic construct
  source 1..79: mol_type = other RNA
ggaaactaatcgaaataaaagagccccgtactcttttatttctattaggttaggagccttagcatttgtatcttaggta

SEQ ID NO: 70 - RNA, 79 nt, synthetic construct
  source 1..79: mol_type = other RNA
ggaaatgtgatttccagcaacttcttttgaatatattgaattcctaattcaaagcgaacaaatctacaagccatatacc

SEQ ID NO: 71 - RNA, 74 nt, synthetic construct
  source 1..74: mol_type = other RNA
ggaaatcgtagagagtcgtacttacgtggtcgccattgcatagcgcgcgaaagcaacaggaacaagaacgcgcc

SEQ ID NO: 72 - RNA, 74 nt, synthetic construct
  source 1..74: mol_type = other RNA
ggaaatcgtagagagtcgtacttagaataaacagagtcgggtcgacttgtctctgatactacgacgtcacaatc

SEQ ID NO: 73 - RNA, 79 nt, synthetic construct
  source 1..79: mol_type = other RNA
ggaaaatttgccttcggagttgcgtatcctgaactgcccagcctcctgatatacaactgttccgcttattcgggccgcc

SEQ ID NO: 74 - RNA, 79 nt, synthetic construct
  source 1..79: mol_type = other RNA
ggaaatctgagcaggaatcctttgtgcattgaagactttagattcctctctgcggtagacgtgcacttataagtatttg

SEQ ID NO: 75 - RNA, 79 nt, synthetic construct
  source 1..79: mol_type = other RNA
ggaaagcgattgaaggcgtcttttcaactactcgattaaggttgggtatcgtcgtgggacttggaaatttgttgccacc

SEQ ID NO: 76 - RNA, 104 nt, synthetic construct
  source 1..104: mol_type = other RNA
ggaaatttttttttgatattataagagtttttttttgatattaagaaaatttttttttgatattagaagagtaagaagaaatataagaccccggcgccgccacc

SEQ ID NO: 77 - RNA, 57 nt, synthetic construct
  source 1..57: mol_type = other RNA
ggaaataagagagaaaagaagagtaagaagaaatataagagccaaaaaaaaaaaacc

SEQ ID NO: 78 - RNA, 76 nt, synthetic construct
  source 1..76: mol_type = other RNA
ggaaatctccctgagcttcagggagtaagagagaaaagaagagtaagaagaaatataagaccccggcgccgccacc

SEQ ID NO: 79 - skipped

SEQ ID NO: 80 - RNA, 36 nt, synthetic construct
  source 1..36: mol_type = other RNA
ggactcactatttgttttcgcgcccagttgcaaaaa

SEQ ID NO: 81-99 - skipped (19 entries)

SEQ ID NO: 100 - RNA, 119 nt, synthetic construct
  source 1..119: mol_type = other RNA
taatagtaagctggagcctcctgagagacctgtgtgaactattgagaagatcggaacagctccttactctgaggaagttggtacccccgtggtctttgaataaagtctgagtgggcggc

SEQ ID NO: 101 - RNA, 119 nt, synthetic construct
  source 1..119: mol_type = other RNA
taatagtaagctggagcctcactctcctctccatcccgtatccaggctgtgaatttttcaaggaatataaagatcgggatgtacccccgtggtctttgaataaagtctgagtgggcggc

SEQ ID NO: 102 - RNA, 119 nt, synthetic construct
  source 1..119: mol_type = other RNA
tgatagtaagctggagcctctagtgacggcaacagggcttggtttttccttgttgtgaaatcgacatctctgaagacagggtacccccgtggtctttgaataaagtctgagtgggcggc

SEQ ID NO: 103 - RNA, 119 nt, synthetic construct
  source 1..119: mol_type = other RNA
tgatagtaagctggagcctccttccatctagtcacaaagactccttcgtccccagttgccgtctaggattgggcctcccagtacccccgtggtctttgaataaagtctgagtgggcggc

SEQ ID NO: 104 - RNA, 119 nt, synthetic construct
  source 1..119: mol_type = other RNA
tgatagtaagctggagcctcccataacatgacatatctggattttgtgcttagaaccttaaattggaagcattcttaattgtacccccgtggtctttgaataaagtctgagtgggcggc

SEQ ID NO: 105 - RNA, 119 nt, synthetic construct
  source 1..119: mol_type = other RNA
taatagtaagctggagcctccggaaaactaaaatagagatatttcaagattttataattttcaaagacctttgaaatattgtacccccgtggtctttgaataaagtctgagtgggcggc

SEQ ID NO: 106 - RNA, 119 nt, synthetic construct
  source 1..119: mol_type = other RNA
taatagtaagctggagcctctacacattgcttctagttggcagaaataattgattaaaagaccagaaactgtgataactggtacccccgtggtctttaaataaagtctaagtgggcggc

SEQ ID NO: 107 - RNA, 119 nt, synthetic construct
  source 1..119: mol_type = other RNA
tgataataggctggagcctcggtggccatgcttcttgccccttgggcctccccccagcccctcctccccttcctgcacccgtacccccgtggtctttgaataaagtctgagtgggcggc

SEQ ID NO: 108 - RNA, 119 nt, synthetic construct
  source 1..119: mol_type = other RNA
tgataataggctggagcctcggtggcctagcttcttgccccttgggcctccccccagcccctcctccccttcctgcacccgtacccccgtggtctttgaataaagtctgagtgggcggc

SEQ ID NO: 109 - RNA, 141 nt, synthetic construct
  source 1..141: mol_type = other RNA
tgataataggctggagcctcggtggccatgcttcttgccccttgggcctccccccagcccctcctccccttcctgcacccgtaccccccaaacaccattgtcacactccagtggtctttgaataaagtctgagtgggcggc

SEQ ID NO: 110 - RNA, 141 nt, synthetic construct
  source 1..141: mol_type = other RNA
tgataataggctggagcctcggtggcctagcttcttgccccttgggcctccccccagcccctcctccccttcctgcacccgtaccccccaaacaccattgtcacactccagtggtctttgaataaagtctgagtgggcggc

SEQ ID NO: 111 - RNA, 142 nt, synthetic construct
  source 1..142: mol_type = other RNA
tgataataggctggagcctcggtggcctagcttcttgccccttgggcctccccccagcccctcctccccttcctgcacccgtaccccctccataaagtaggaaacactacagtggtctttgaataaagtctgagtgggcggc

SEQ ID NO: 112 - RNA, 141 nt, synthetic construct
  source 1..141: mol_type = other RNA
tgataataggctggagcctcggtggcctagcttcttgccccttgggcctccccccagcccctcctccccttcctgcacccgtaccccccgcattattactcacggtacgagtggtctttgaataaagtctgagtgggcggc

SEQ ID NO: 113 - RNA, 164 nt, synthetic construct
  source 1..164: mol_type = other RNA
tgataatagtccataaagtaggaaacactacagctggagcctcggtggccatgcttcttgccccttgggcctccccccagcccctcctccccttcctgcacccgtaccccccgcattattactcacggtacgagtggtctttgaataaagtctgagtgggcggc

SEQ ID NO: 114 - RNA, 188 nt, synthetic construct
  source 1..188: mol_type = other RNA
tgataatagtccataaagtaggaaacactacagctggagcctcggtggcctagcttcttgccccttgggcctccataaagtaggaaacactacatccccccagcccctcctccccttcctgcacccgtaccccctccataaagtaggaaacactacagtggtctttgaataaagtctgagtgggcggc

SEQ ID NO: 115 - RNA, 60 nt, synthetic construct
  source 1..60: mol_type = other RNA
ctgagagacctgtgtgaactattgagaagatcggaacagctccttactctgaggaagttg

SEQ ID NO: 116 - RNA, 119 nt, synthetic construct
  source 1..119: mol_type = other RNA
tgataataggctggagcctctcacacacctctgccccttgggcctcccactcccatggctctgggcggtccagaaggagcgtacccccgtggtctttgaataaagtctgagtgggcggc

SEQ ID NO: 117 - RNA, 109 nt, synthetic construct
  source 1..109: mol_type = other RNA
tgataataggctggagcctccaccgcgttatccgttcctcgtaggctggtcctggggaacgggtcggcgggtacccccgtggtctttgaataaagtctgagtgggcggc

SEQ ID NO: 118 - RNA, 257 nt, synthetic construct
  source 1..257: mol_type = other RNA
tgataataggctggagcctctgcccggcaacggccaggtctgtgccaagtgtttgctgacgcaacccccactggctggggcttggtcatgggccatcagcgcgtgcgtggaaccttttcggctcctctgccgatccatactgcggaactcctagccgcttgttttgctcgcagcaggtctggagcaaacattatcgggactgataactctgttgtcctgtacccccgtggtctttgaataaagtctgagtgggcggc

SEQ ID NO: 119 - RNA, 219 nt, synthetic construct
  source 1..219: mol_type = other RNA
tgataataggctggagcctcggtggcctagcttcttgccccttgggcctccccccagcccctcctccccttcctgcacccgtaccctttttttttttttttttttcttcttttcttttttttcttttttttttttctttctttttttctttttttttcttttcttttttcttttttttttttttttccgtggtctttgaataaagtctgagtgggcggc

SEQ ID NO: 120 - RNA, 219 nt, synthetic construct
  source 1..219: mol_type = other RNA
tgataataggctggagcctcggtggcctagcttcttgccccttgggcctccccccagcccctcctccccttcctgcacccgtacccttttttttttttttttttttttttttttttttttttttttttttttttttttttttttttttttttttttttttttttttttttttttttttttttttttccgtggtctttgaataaagtctgagtgggcggc

SEQ ID NO: 121 - RNA, 119 nt, synthetic construct
  source 1..119: mol_type = other RNA
tagggttaagctggagcctcggtggcctagcttcttgccccttgggcctccccccagcccctcctccccttcctgcacccgtacccccgtggtctttgaataaagtctgagtgggcggc

SEQ ID NO: 122 - RNA, 119 nt, synthetic construct
  source 1..119: mol_type = other RNA
taaagctccgctggagcctcggtggcctagcttcttgccccttgggcctccccccagcccctcctccccttcctgcacccgtacccccgtggtctttgaataaagtctgagtgggcggc

SEQ ID NO: 123 - RNA, 119 nt, synthetic construct
  source 1..119: mol_type = other RNA
taagcccctgctggagcctcggtggcctagcttcttgccccttgggcctccccccagcccctcctccccttcctgcacccgtacccccgtggtctttgaataaagtctgagtgggcggc

SEQ ID NO: 124 - RNA, 119 nt, synthetic construct
  source 1..119: mol_type = other RNA
taagcacccgctggagcctcggtggcctagcttcttgccccttgggcctccccccagcccctcctccccttcctgcacccgtacccccgtggtctttgaataaagtctgagtgggcggc

SEQ ID NO: 125 - RNA, 119 nt, synthetic construct
  source 1..119: mol_type = other RNA
taagcccctccgggggcctcggtggcctagcttcttgccccttgggcctccccccagcccctcctccccttcctgcacccgtacccccgtggtctttgaataaagtctgagtgggcggc

SEQ ID NO: 126 - RNA, 119 nt, synthetic construct
  source 1..119: mol_type = other RNA
taaggctaagctggagcctcggtggcctagcttcttgccccttgggcctccccccagcccctcctccccttcctgcacccgtacccccgtggtctttgaataaagtctgagtgggcggc

SEQ ID NO: 127 - RNA, 119 nt, synthetic construct
  source 1..119: mol_type = other RNA
taagtctccgctggagcctcggtggcctagcttcttgccccttgggcctccccccagcccctcctccccttcctgcacccgtacccccgtggtctttgaataaagtctgagtgggcggc

SEQ ID NO: 128 - RNA, 119 nt, synthetic construct
  source 1..119: mol_type = other RNA
taaagctaagctggagcctcggtggcctagcttcttgccccttgggcctccccccagcccctcctccccttcctgcacccgtacccccgtggtctttgaataaagtctgagtgggcggc

SEQ ID NO: 129 - RNA, 119 nt, synthetic construct
  source 1..119: mol_type = other RNA
taagtctaagctggagcctcggtggcctagcttcttgccccttgggcctccccccagcccctcctccccttcctgcacccgtacccccgtggtctttgaataaagtctgagtgggcggc

SEQ ID NO: 130 - RNA, 185 nt, synthetic construct
  source 1..185: mol_type = other RNA
taaagctccataaagtaggaaacactacagctggagcctcggtggcctagcttcttgccccttgggcctccataaagtaggaaacactacatccccccagcccctcctccccttcctgcacccgtaccccctccataaagtaggaaacactacagtggtctttgaataaagtctgagtgggcggc

SEQ ID NO: 131 - RNA, 188 nt, synthetic construct
  source 1..188: mol_type = other RNA
taagcccctccggggtccataaagtaggaaacactacagcctcggtggcctagcttcttgccccttgggcctccataaagtaggaaacactacatccccccagcccctcctccccttcctgcacccgtaccccctccataaagtaggaaacactacagtggtctttgaataaagtctgagtgggcggc

SEQ ID NO: 132 - RNA, 188 nt, synthetic construct
  source 1..188: mol_type = other RNA
taaagctccccggggtccataaagtaggaaacactacagcctcggtggcctagcttcttgccccttgggcctccataaagtaggaaacactacatccccccagcccctcctccccttcctgcacccgtaccccctccataaagtaggaaacactacagtggtctttgaataaagtctgagtgggcggc

SEQ ID NO: 133 - RNA, 185 nt, synthetic construct
  source 1..185: mol_type = other RNA
taagtctccataaagtaggaaacactacagctggagcctcggtggcctagcttcttgccccttgggcctccataaagtaggaaacactacatccccccagcccctcctccccttcctgcacccgtaccccctccataaagtaggaaacactacagtggtctttgaataaagtctgagtgggcggc

SEQ ID NO: 134 - RNA, 139 nt, synthetic construct
  source 1..139: mol_type = other RNA
taaagcgctggagcctcggtggcctagcttcttgccccttgggcctccccccagcccctcctccccttcctgcacccgtaccccctccataaagtaggaaacactacagtggtctttgaataaagtctgagtgggcggc

SEQ ID NO: 135 - RNA, 194 nt, synthetic construct
  source 1..194: mol_type = other RNA
taaagctccccggggtccataaagtaggaaacactacagctggagcctcctgagagacctgtgtgaactattgagaagatcggaacagctccttactctgaggaagttgtccataaagtaggaaacactacagtaccccctccataaagtaggaaacactacagtggtctttgaataaagtctgagtgggcggc

SEQ ID NO: 136 - RNA, 241 nt, synthetic construct
  source 1..241: mol_type = other RNA
taatagtaaacctcactcacggccacattgagtgccaggctccgggctggtttatagtagtgtagagcattgcagcacttagactggggtgctgtagtctttattgtagtctttccacatacctgataattcttagataatttcttattttaattccataaagtaggaaacactacataaatctccataaagtaggaaacactacatattcttccataaagtaggaaacactacataggct

SEQ ID NO: 137 - RNA, 193 nt, synthetic construct
  source 1..193: mol_type = other RNA
taaagctccccggggtccataaagtaggaaacactacagctggagcctcctgagagacctgtgtgaactattgagaagatcggaacagctccttactctgaggaagttgtccataaagtaggaaacactacagtaccccccgcattattactcacggtacgagtggtctttgaataaagtctgagtgggcggc

SEQ ID NO: 138 - RNA, 187 nt, synthetic construct
  source 1..187: mol_type = other RNA
taaagctccccggggtccataaagtaggaaacactacagcctcggtggcctagcttcttgccccttgggcctccataaagtaggaaacactacatccccccagcccctcctccccttcctgcacccgtaccccccgcattattactcacggtacgagtggtctttgaataaagtctgagtgggcggc

SEQ ID NO: 139 - RNA, 119 nt, synthetic construct
  source 1..119: mol_type = other RNA
taaagctccccgggggcctcggtggcctagcttcttgccccttgggcctccccccagcccctcctccccttcctgcacccgtacccccgtggtctttgaataaagtctgagtgggcggc

SEQ ID NO: 140 - RNA, 109 nt, synthetic construct
  source 1..109: mol_type = other RNA
taagcccctccgggggcctccaccgcgttatccgttcctcgtaggctggtcctggggaacgggtcggcgggtacccccgtggtctttgaataaagtctgagtgggcggc

SEQ ID NO: 141 - RNA, 119 nt, synthetic construct
  source 1..119: mol_type = other RNA
taagtctaagctggagcctcctgagagacctgtgtgaactattgagaagatcggaacagctccttactctgaggaagttggtacccccgtggtctttgaataaagtctgagtgggcggc

SEQ ID NO: 142 - RNA, 109 nt, synthetic construct
  source 1..109: mol_type = other RNA
taaagctccccgggggcctccaccgcgttatccgttcctcgtaggctggtcctggggaacgggtcggcgggtacccccgtggtctttgaataaagtctgagtgggcggc

SEQ ID NO: 143-149 - skipped (7 entries)

SEQ ID NO: 150 - RNA, 85 nt, unidentified
  source 1..85: mol_type = unassigned RNA
cgctggcgacgggacattattacttttggtacgcgctgtgacacttcaaactcgtaccgtgagtaataatgcgccgtccacggca

SEQ ID NO: 151 - RNA, 22 nt, unidentified
  source 1..22: mol_type = unassigned RNA
tcgtaccgtgagtaataatgcg

SEQ ID NO: 152 - RNA, 22 nt, unidentified
  source 1..22: mol_type = unassigned RNA
cgcattattactcacggtacga

SEQ ID NO: 153 - RNA, 21 nt, unidentified
  source 1..21: mol_type = unassigned RNA
cattattacttttggtacgcg

SEQ ID NO: 154 - RNA, 21 nt, unidentified
  source 1..21: mol_type = unassigned RNA
cgcgtaccaaaagtaataatg

SEQ ID NO: 155-171 - skipped (17 entries)

SEQ ID NO: 172 - RNA, 87 nt, unidentified
  source 1..87: mol_type = unassigned RNA
gacagtgcagtcacccataaagtagaaagcactactaacagcactggagggtgtagtgtttcctactttatggatgagtgtactgtg

SEQ ID NO: 173 - RNA, 23 nt, unidentified
  source 1..23: mol_type = unassigned RNA
tgtagtgtttcctactttatgga

SEQ ID NO: 174 - RNA, 23 nt, unidentified
  source 1..23: mol_type = unassigned RNA
tccataaagtaggaaacactaca

SEQ ID NO: 175 - RNA, 21 nt, unidentified
  source 1..21: mol_type = unassigned RNA
cataaagtagaaagcactact

SEQ ID NO: 176-194 - skipped (19 entries)

SEQ ID NO: 195 - RNA, 100 nt, synthetic construct
  source 1..100: mol_type = other RNA
aaaaaaaaaaaaaaaaaaaaaaaaaaaaaaaaaaaaaaaaaaaaaaaaaaaaaaaaaaaaaaaaaaaaaaaaaaaaaaaaaaaaaaaaaaaaaaaaaaaa

SEQ ID NO: 196 - RNA, 120 nt, synthetic construct
  source 1..120: mol_type = other RNA
aaaaaaaaaaaaaaaaaaaaaaaaaaaaaaaaaaaaaaaaaaaaaaaaaaaaaaaaaaaaaaaaaaaaaaaaaaaaaaaaaaaaaaaaaaaaaaaaaaaaaaaaaaaaaaaaaaaaaaaa

SEQ ID NO: 197-208 - skipped (12 entries)

SEQ ID NO: 209 - DNA, 21 bp, synthetic construct
  source 1..21: mol_type = other DNA
  modified_base 21: mod_base = OTHER; note = Inverted deoxythymidine
  misc_feature 1..20: note = RNA
  misc_feature 21: note = DNA
aaaaaaaaaaaaaaaaaaaat

SEQ ID NO: 210 - RNA, 21 nt, unidentified
  source 1..21: mol_type = unassigned RNA
agtagtgctttctactttatg

SEQ ID NO: 211 - DNA, 126 bp, synthetic construct
  source 1..126: mol_type = other DNA
  modified_base 126: mod_base = OTHER; note = Inverted deoxythymidine
  misc_feature 1..125: note = RNA
  misc_feature 126: note = DNA
aaaaaaaaaaaaaaaaaaaaaaaaaaaaaaaaaaaaaaaaaaaaaaaaaaaaaaaaaaaaaaaaaaaaaaaaaaaaaaaaaaaaaaaaaaaaaaaaaaaatctagaaaaaaaaaaaaaaaaaaaat

SEQ ID NO: 212 - RNA, 22 nt, unidentified
  source 1..22: mol_type = unassigned RNA
caaacaccattgtcacactcca

SEQ ID NO: 213-217 - skipped (5 entries)